United States Patent Application Publication US 2025/0130221 A1 - sequence listing, part 6

SEQ ID NO: 431 - DNA, 88347 bp, Homo sapiens
  source 1..88347: mol_type = genomic DNA; note = NC_000007.14:c123201836-123113490 SLC13A1 [organism=Homo sapiens] [GeneID=6561] [chromosome=7]
agaggttggctgaaggtaaggagaaggtgaggctgttttgtaataatgaacacccacagcagattcagctagctagagcccaggccataagaatagggtcctggagccttcctctggtgagaaatgaggacctaaagagagaaaatagggcacagaaaggagggactaacaaatgtcaagtgcttttcccttagcctctgtctggttccagttgcctacacataggctctcatttcctttaaatgtcacacaaatgccttttcgttttttggtgtcatctcacaaagtaaaatcctctaagatgaaaaagtgaggctcaaatcatctcaccaggtagctgaaggaaatctgagagcaaaaatggtttcttcaaaaagtagtagtttaaaaaaaagcatgcaatgaactagagaactgtacagggtgttaatggaaaaaaataagtactacaactggtttgagtaaatcagttcataaattaattttaacactatatactattgttacctatttattatcacttaccattttattacaatatcatttgtaattatcctttcatctaagaaatttaagatataataagactttctggtttggaaactttttttctgtttactattctgattttcctgaataactgtccataatagatgtttaggaatttaaattttttacaggaaaaaaatgctttctcatttacattaatatggtgagtactggtgagagaattgtttctcttgatggaaagagaatgcagagttatattagtatgaagttagaaataagacctaaatgctaactatagattacataagagtaaggttatctatgtcaagagatattgactataaattctagtagggctgggaatgtgtttcatttatatctaaagacaagtagtagttgctaacttgaggtttactggatcatcaatttacaacacaacgtgaaaaaaaccagggtccttatccctgaagattttcaaaatacatcctccatatcactgttggaacagtctccaacttcccatgtgctcatgtgcacaaaccatacacacacacacatcacacaccacttgaatgtccctaatcactcatctttatgcagattccctgataattatgtagtctgtatcagcacaacagtatcaaatcaagccttcaaaggtcttaaaatagagggtttatataacacttcatggttattttggttttctatcaaaagagacaatagggtccaagaaatacacaaaactttgcttctaaccaacagggacatttgctataaattttgtagaagacccttgcaatacattgtccaagaagtccgttaaaaatccatctctaaacaaaaaagtttccctttcactgtcatacactgaaattccaactattagttgctatttcaatttacacactgaaaacatacttccttagaaagggccatggaggctgcctgtggagactcactcatggcaccatgacaatgtggtaactactccagttagggagtctggaagtcagaggacatcaaaagggttggaagtgcctcattgtgaacaaacaaccagcttcatggttttgccttctcctaggcttgtccagtctgtatttcagtgaatgtgatcaaagaaagcagggaaagaacagtttttccttgaaaacccagaggagcaaatggtctttgatttctcatgaaaagtcttgggcctatctcttcatgttaattgtgatagtaaaacaataaaaaatgagatttaattttaacttgtgttggtcggtctagggcagtgagtgaaggtgacaggctggaaaaatattaatccaagttggttatttaacatctgctttatttggaggacactattgaagccacctgctcaggacaatgaaattcttcagttacattctggtttatcgccgatttctcttcgtggttttcactgtgttggttttactacctctgcccatcgtcctccacaccaaggtgagtgaacctggagaacagactggtggatttcctgacttatttaattgtcctttattaaaactgtttgctgtttaactgcctggctcagagctgaatgaatgttgacccttcatacctaaagtcaggatggttgtacatgatgttttggccattttctccctttttaataattaacattggttgattcttagtatgattaaacataattaaatagaatattcaatcagaattgttctctgcctatcaactagatgagaggaagaacaaaagaagcacaacctttgagattttgcagttcaagttgtcattctccagggagcatgcatggctagtgcaatgccttcccctgagaataggcagcaaagcaattgctggggacagaggtggaagaacaagggaaatcctaggtccagcacagactaatttacttctcagctctgtggctttgtcacagaacttcctggaaatttagttcccttgtaggaaaagaagacattgaaagcttagagtaatttcccttggtcaatcagaaaatctaataaagcatttaccatgttctgataattccaggttttgtttcattgtggtgtacttgtaagcatttttgtttgctttttaagagtagtcagggcattaagtccagaacaataagctcaagcatgtttaatttcttggtaaaatgatttgaatcagcaaacatttaatgagcaccttctctgtgccaggcacaaacgtcacttggtagtaagaggacaggctttggagccagattctctgcttcaggtcccagatttaccacttacaaactgtgtcacctgggcatgctacttaatgtctctgtgcttctgttttctcatatgaaagatgtgtatagtagcaggcttgttgtgagaatgaaatgaagaaacactcttcaaacacttatttggagcagtgcctggcacacagtaagtgtgcagtgccagtctccttgggtgtgttgactccacaggtggggcaattcccagcactccattatgcacagtccctcctcttaatgggcaagaaccctgctgatgctctcctctaacaagtactaatcgaggttacaccagtctgggttataatagaatcatattaactataatatggtggtccctccagcctctgccagaagcctttgccagtgatcctgggacctctgaagggaattcatgtgagctaataaagtccttttggacactgtcaaggcctatcctacctgcaaagctggagaagggactggcccctgctgtggcatctgtgggttgtctcccaccaggtgcaatcttctagctgcagcattcttggcttatctctccttgtgctgaggtctcacagagctacatggagggaagggaaaaactccccaccccttttggtccaaatttctaagccctcaaattcgtacagaatttgtaaataataataataactaaaagaccttgtcagctgtttttggctttgttggttttgtttttcaaattctgtgtgactaaccctttccctcccaccctgccactcccaccccggctccttgtgaggtctcctatatgaatctctggcagccccatcagatgacaaattccagcacagaaatagtgctctattctgaattctcaccccatctccttgccaagaacttcatctaagacacattatgatcttcactttgcaactctcctggtcccatgagtcctctagatttggctgaatcctatcatgaccatatcctgcttcatacctggagccctgctatattttaatatttttgagttagtctcagcatacattcttacttatggcagagaaagtaggaaattaaactagtcaagacaaatttaggtcattaccacatatcatctgtgctgctctttttacatataaatgcatgacaatttgattatcctccataattttctgagaaatgaatataaactctttgaaaaacaaaatgagtaaataaatcaaaagcaatcattttagtacatgattcattcactgggaagtgtattatttttaagaaatgcagccactgattattttttccaaggtgctatgacaaaagaacattaggtccatgcaggaaccaggtgtctggcaccaagttgcatctggtgagctggttcctctttcctttcctcctaatcaactcatttgttaaaactcaattaatgttaatggaggatttattcctagtataataacatgatattattttttggccactttaaacatatatttaatcattcaataaactgctaattaaactgaaagactattattttaacttgcttacaatgaaagcaaattatttttttaaagaatgtaggcctttggagggtataaaatttaaggagaagtttactttaacataaatgcaagtcaatttactgttaacttttaggttaccaaactgaagaagtctatgcttctaaagacacaatattagattaattaaaacattcaatggaaacaaaaatccaagtttctctttcaaaaccacaattataaaaaataattccatgtggggctataatctacaggatgtagagccaacaaacaatgaattattgactgatttctttccttcattttcctgcttgttattgagttgttcaatagactggccttaacttatgtcttaattccatctaaagtgaaaaaagtgccatgaatgaagaaagaccctaactggtttttcaatgtactattaacagggacggagaatagactgatttgcagagtactcttctgtttcaggcattctgccaactgctttccccaaattatcttatttaacctccatcacaaacgaataaacaagtacaaatgtgcttctcgttttacatttgagggaattgatgctcagagacatgtaactcaccaaaggccatctacatgctctagaaagtaaatttgagcttggatcctgtcagaactcagaattcatgctttaaaagtgattttgttttagtcttttgtatatttttgaagacttactctttcatggcttgttcatcatttgtcaacaacacaggcatttctgttcatgaaaatgctttagacaggccaaacagaagagttctgttttaaccatttcctcaattgaccttatggtacgcaatgtcattaaggtagaaagttgcagtgattctaaccactgaagataggcttatgagaactgaagctataaggatgtcatttgctgggtgtcccagagccccagttttttaagctggtcagtcagcttgtcaggatatggtgccccttttctccatacttgcgtccgaattggaaatagagacaaaaacaggtaagcagcttgcaaaaatctggctacacagatttttccaaccaacttctgtctgactctagagccaatgatgttaatcacaactgagtatctgtgtctttatagcttccgtggtcataataaatatattcctagtacattgctgtgaatctcacttcgctaatgcaattccattttcttattgatttacactgagcatcagaaattctttctgtctcttaaacataatggtaatctcagtccttacccaattagtagttaatgatcagtaaacaagtctggagtgtaactgctttttatttgaatgaaataatcacactgagtttttctcattttggagagaaatttctttaaatatttccagttaaaatcttggtaaaactggcctagtatatactgacatagtttcagtaatattctatgtgcaactttgttctttttaggctattttgttaatttttactcttttcagcagtcaatactatttccttacttatttttccagttattggattttctttgtatttttattcatgaaacaaaaaggccagatttgttagaagtaagaggggaaaatcaaacaacaatatattatatttgtagagtgcaattcttccaggtatacctattctatctagcttacttattaatcaggacccctttttaagatcaggagacaaggaaacaaccacacatatactgagcagcatttcttagttgatgggttgtaaaaccgataccaaattttaattctttcttcagaaaatattttggatttctctagaaaatattttatattctaactttgaaactcacgatatagtcacttgaatcatgatgactttcaaagtgagaatagaaataataataaataaaatgatacatgatgagagacttatggtgctagatataaaaataaaataaacagatgggagaaatataatgattgtaaggaaatataaactttaaaaagtgaagtatcccctagaaggaggaagtggtaggtcgagaagttggtcaaagaaaatgaaaatgagtaggagataatttaaaaagactataagtgaaagaagagggaggagagaaattccaagaaaacagataagttttaaagagccaaataaaataattaaatatattaatggaaataattgatactgttttaaatgttggcataaaaatattgtagggatttaagataaagaagaaaatgctataaagtccaagtaagtgaatattttggacaccaaagaatgcagaaatgatgaagaacaaggaaaaaaatagaaataatgctaatagcaatgtggtagttcgacaaaaccagaaaatccaattttggtaatatatttttatttcacaaatattttacaagaactttcccagcccaaagtgttgtgccagatgaattgtgtgatataagcagaagtttaaattaatgtttctgtctttatgtagcttgcagaattgctggaaagtcattatatagtatgacaaatattaatggcaaaagtaggttgtacctaaacacatgccgaataatttaaagaaatcatctgtgctatgaaggcgtaattaaaaagtggataaaccactaaggattcatcatcttccagctcctctgttcccctaaccgcatgcagtcccacttgcccaaaacctgctgctccttctgttttctttatgtcagagaatgccactacccttctctccattcacaggtttgaaagctgtatgtcatctcagatgcttcaaatatccacaagcccccatcactaatacggtgttgcatctccttaatctaaatcctcctaaatctcccctctcaacctcatcttctcctctctttcctttcctgctggcactgctttccttgaagctgtctttctctttctttcatagactgtttgttttttacacactttcccctacagtctctggccagagtactattttttaaatgccaactcagtccaattgtgaaaaatcaaaatttttcaatggttcctttttgcctataatggaaaaatatctaaacaaaagatggttttgctgatggatatttctgacttttcatttatttgtcctaaaagcctccaccacacagtccccagtatctatctcccacatttgcattttcctctttaacaatacttcactatttgcagtttctagaatgcctgtgattattcttgtctctctgccttctcacacgctatatcctcctcctagaatgccatctcctcttacctcacccttcttgggaaggaaggctcaggctgtgatgtaaactaaggatcatcctcgatgctctcattgcatcatggatacattggcctctattacagtatgtcttccgttttgctttatctttgtgtctccctccagactgtaaatatctcaagaacatggagcatagtgtttaaatttctgtctcctccagcaccaaacccagtgcctgtcacatagtagatagttaataactgtgttgagtgaaggatgatctagcgtggcagaaggatgtaaggctttggacctgataggaaggagagaatgcaggagaaagaggttgatgaaagaggggaacttcaatagagtgaaaataatgatgaaaggacagaacaagaagaatgtaggtgtaaccagaggctgtccctttcacaaagctctttcttcctcccataatatgttttataccttgtttggtaacaatagtaaatgtgaatgcccactgtgagcctcatagcgacaattagaaatagtcaatatcatcccaattttacagaacagaaactcagagaggtcaagaaatgtgatcaaagtcacacagtccacaaagggagcaagaggacttaaacacaaatctgtctgacttccaagctcatgatgtcattgcttatttaatgatatttatatcagatctttaaaagctgtgctcagattgccttatgtcattgttcctgcatttgcaatcacgaaagcacaggttgaggtgatgcctctctcagcctggatcacgtagtaacctctacccatgatggacaaatagtataagtaagaaataattggctgttttagactgctgagattttggaacttttgccacagcatagcttatcctgtcctgattaacatagcatattctgaaacattccccaagtgactcagacatgctacccttggctgatttttttttttatttataaaatgagcaaggctctttttaaaaagttccaaatgttgtctatggataagcttccccagattcacctgagatacttgtgtaaaatcataaactcttaatgtgaagtgtaggatgctgcacgttgaacaaactccccaggtgattctggagcaggtagttcatggattgcattttgatcataaccaaatgtgtagtcaggttggagaactgattatttctgtacctttttccagttccactgtgtacagagtatgaaaacaatgcatctcaggtgctggttaggtgtggaggttgagtgaaaaggaggaactaaaaatttcccaataactggtttagtgggccatcaattgcttttctctactatccattttggctaaaaacttaaaaaaaaagaaaagaaaaaacatctagttatttctccttgactttgtagttgaacttatttttactatccatcttccaaaatgaggatattttaaagcactttaaactttgcaattaatataaattgagtcttaagaaatcactgctgcagtaggggtaggaataccaagaaccatacaaagcccttcacaggctctgtcaaataataatgatgtttttcttgtagcacagagatttagaatgcatgatttttctccttttttaattgctttgtgttctctttagaaaatcaattgtagtgattgaggtctgtgattggctctgcttttctcacgctgtgctgagaagagatcatacccacatacgtactaattcatcagccaaattactccctaatatcagtcagtatgtcatttaaaaaagcagaagagatgaaaaaactatattttaaagccaaacttatattctaattccatgtggggctataatttaaaagagaaccaaggtgatttttaaatgtaatcagccacattttgtaagataacttgacagtcagaactttgtaaggaggaaaaagtcattatccaaattgcctagtcatagctttctttgcctttttcaccccttcagcaagtgccctagctgtgcacttgaggtggttaagacaagatatgactatgatatttttaactgggggctgggtaagtgggaatgtctgtgatggaggaattcacctatgcaggtggacattttagttccagtgctgtttattagcaagagagatgagggctgcaggaaaattgtaaacacattcacccactggggcaggagtcaaaatatccagttccaggcaaggaggagagaacagagaaaagggaacaaggcaaagagaaagaagtttctatgctaaggaaccttatgcctaagataaagatttagtgttttataagatatataaatacaaacaatattagaaagaacagaaagaagaaccttactcactcaaatatgttactgaccgtatactctatgccaagtactgctttaaatgttgggaacagggtagtaaattttaaaaatatatactctgatagagtttatacatggacaaatctcaactctaccacacgctagcagtgtgatcgttgaaccttagttcagcatggaattacaatatctaccccaaagaatcttggcgagggttaaataaaatgtcatgtggagtgccaagtgttgttatctggcacattataagcattcatgagtattacttgcccatcctatagtaagtcagaaaacaggtttatctgtctacttggcaaatattttcacatcttaaataagtttttctatatataaagtctatgatcaacagtctagatgaggttttagacaattaggatcctcccttcccaagctctttctccattggaaacacaaagcaaataaagatctctgtagatcagaatgagtcagaaaagcaaacaagtggcatgaatgtggaaacctgtggttgaaagcactcccatgccattcagggaccagagtcaggttaaatgccagaaactaagggctggaaaatggttttctcaaacctgtgaaggacagaaagagctggattgatcgctggctatgatggctcacaggaagcaaacactgcccagctccccagccaagacctcacccatactacccaactcagctagatgactggatccatgttatgctggcaagaaaagaactctagggtgtcaagataagacccatctgaaccaggaactaggaactggctggaagcaactgtaaaagtgctagatgagaaacaaggagtgcagaagaagaaaacacaagaataaagctaccactcagaataaatttgaaaataaaatttcaaaatacaataagacactaaagaaagactgacaaaatccgctcagaagaaatgaaaataatagggaaatcaacaagttaggaaaggaaaaaaacaaaaaaagagaaacaaattatttttcaaaatataaagcaagagcaggaaagtataaaataaaactagttagatatcctggaattttgtcactgagattaaaaaaacaaacaaaatcctcaatagatgtgtcatgtttgaggctcctgggtggtcctagttaaccagcttccccaggggcaacttctcctttttcatttgattcatgtcaaagatgagtcttagacactctaatgctcaacagcttattctcaacagcttctcctttttcatttggttaatgtcaaatatgagtcttagacagcttattctaatgctcaacagcttattctgacttttccaagatgaagatgaagagcaggccagtggcatgggccagatgcagtcagatgactgactgaccaggagggcctccgtccagtgaccagtctcagaatttaaaggacccttcccccttacttatgcttgtactcagcccaggtgagttaccagccatttctctcataaagggagtttaaacaattctggaaagagtaagccttttttgtttatgaaagttgcatctgaggtagccttgtctcctggaaatccccaggccaaggttggaaatccccaagccagtctgcatcacattgctaagtgacacttagtgtcaaccctactctgtgacatactgctacgtgacatgtagtatcagcaagatgcctgaataagccttatggctatcattaatcttataaccagggtatgtctcttatagtatactacaagatgaaataaactttaaactgagtatccttgaagatatattcagtgaactgagaaagaatactaggaatttacctaaaatatcaaatagaatataaaaggatatctttaagtgagagaatcatttggagaatgaattcagagccccaacatatgtataaaagacattaccgaaaatgaaagactagaaaagaagtcatattcaaagtaataattactgaattctccagaatttttttaaaaaagatgagctctcaaatgcatttgtaagtacaaacaacttaattagatattagtccatatttaggcacatcaggaatgagacttcagattaaaaataaggtgaattttttaaagcttccaaatagagaagaaaaaaatctccaaaaggattgtaattagataaatttttcatttcaataataatgaaaacatctaataaatatataatagacctttctggagaaatctacaaaacattatagaagaaatttaatagacacctaaaagaatagagaagttcatagatagaaatacttaaagctatatcttacttcatagattctgtgtaatttgaatgaaaatctgaataaaatttttataacttgagatagtaattttaaaattcaaaagaaagaatgaaaatctaacactattaaggcaatttgaaaaacatataagatgaaggagttgtcatacagattgtaaaccttattgaaaggttagaaatgttaaaagagcataattctgtaagaacttatttttagaaggcagcagtgggagagggagaggacaaaataaagagaccagaagcttatgtgtctgcatttgagaacttcagcatagaaaatatgtagcaacatgaattactaggcaaaaatgagctcattcaatttaaaaagcatggcactttggctattcattttgagaaaaaaaaagtgttagattcctatacaaaaatattaaagctctacacttgaaaaaattttaatcttagaaaaaatatggaaatatataatgtagaaagattttctttcttttttttttttttttttgagacggagtctcgctctgtcgcccaggctggagtgcagtggcgggatctcggctcactgcaagctccgcctcccgggttcacgccattctcctgcctcagcctcccaagtagctgggactacaggcgcccgccactacacccggctaattttttgtatttttagtagagacggggtttcaccgttttagccgggatggtctcgatctcctgacctcgtgatccgcccgcctcggcctcccaaagtgctgggattacaggcgtgagccaccgcacccggccgaaagattttcttataaaatatggtaaaaacatgagacaacagaaaagtgtttaaaatcactgcattaaaattaaaatcctcctgtcaattaaaaatacaataaagctaatttcatagacaagccagagactaagaaaaatgtttacaaatacatagtttatagagaaataatattaagaatctaaaaataactccacaaatccatgagataaaagaaaaaataacccaacagaaaaatgaaaaagaactataaatatataatttacagaagagaaacaattatgttcaataactgtgaaaatactccactggtattcaagaacatggaaattaaataagaagattttttcataccatcagactgtcaaatgaataaattaatcccatataccaaggatggtgaaatggaatttctgaacattgttggtgttaatataaactagtatgaccatctcagcttcttagtcgattttcatagtgctataaagaactgcccgagactgggtaatttataaaggaatgaggtttaattgactcagcgtgactgggaggcctcaagaaacttacaataatggtggaaggggaagtgaggcaacttcttcacaaggcagcaggaaggagaagtgccaaattaagggggaagagccccttataaaaccatcagatctcatgagaactcactcactattatgaggacagcatgggggaaactgcgcccattattcaattacctccacctggtttctcccttgacacctgggtagcatggagattacaattcaagatgagatttgggtggggacaaaaagcctaaccatgtcagatagcaaatgggcaatatctagtaaagttccaatggactccttcccgtttgaagttctgatgctagttttctccaccagctaagaaaatctattttccatagacatgcatgtggagataggtacaaagatgtccatagccttataataataaaatattggggaaaaaatccaaacaaacatcagtagaaaaacagacaaataaatggtaaaatattcataaaaagaaatactacatctattaaaatgaagtaacaataaatctacatgtatcaacatgaatgtatttgaagtacataaaatattgagtgaaaaaagcaagttgcaaagtgacatatagagtaaaccttatttaattttaaaaccacttgttattaatgtattaatgtctgcatgtagtataatcacaaaaacatgaatggaaaggatacaaaccacattctagacagtagttaactttgggaatggtggaggagaaggaaatgagggagtggtccttaacatcagtctttaacagaatatggaatgttttatttgtttaaaaataatttaagcaaatgtggcaaagtgtcaacatttgttaaatatgataaggtgtacaaatatgtttgttgtatatttttactatgttctaaatattttataattttgaaaatgcttctaaagaatacactgctaaaaagcttctaatatatatattttttaatttaagggacgaggaactgcccatactataataacttcatgtctctggtagtgtgaggaaatcttataataggaaagacggagctgccatgaatgagccaaagaggtgcagtgtatacatacagagcaggtatccagggttaagcgacatgacattgcctatgatctaatggaatttcacctggtttccacacaattgcctctgtctggctaggtgtgacttgtttgctgaacttcttgatgtaacttttgggagtcgtaacacgtacagagatttttaagtagaaaagtagtatttttgaggaagtcctctggacttttttttttcccctcttttctctttctttattttgagaaggaatcatgatttaaaaaaaaaaaaattgtaaggtcagtggtagtcataactgtaaatctttacagttatgtccttcatgataaataaacaagataaaagtacacattatttttgttgctatcattcagtttaagaattcataatactaaaatacttcagaacaaaatgtgattaaaacgtttacttgttacggttgcagagtaagttgtaataacgatatcggatgtatcagcaacttccagcagacttgggggtaggttgtgggggaggaaggattcactcatactcttaattgacaactggtcttcttttattgctgttttaccatcgttctcttgaggaggtagtagtagtagtgattgtgtgtaatggtggtaaacaatttgtggtggttttatttcttaggagtaggaggtctgttaaggtgaagaaaaagaggaaagagacaaatttggaagaaatttacaggagacaaagataatatagcttgaaacaattggtcactctatgagtttctagtgacaaaatgaagctactttatgttctacctcaaagccagtcctaaaatcaaatatctaggatctctttttagttgcaacacagttccacaacctctgagtagttttcttcttcatcagaagaacttgtccaccaaaagttactcaccctcgtattctttgtgtgcatgtgtgaatagatgtgaataacacaaaagaagaaaatggttgtttttttttctatctcttatacttttcttcttcttagcaagattattcacagatctttgattttaaagtaaaaaataaccctatatactttaataggatagttttaaaagaaaatacttggtgttgtgtttgaattaaccttctgctatttaatgcctaaggactttgaagggaaagaatgctttcctgcattctttcacatacccaagcacgaccaagaaaaatcacacaatagagaaaaggaattagaggaaggaagcattcctgggatgaacccatcaataggatgcttgtttaatttatcagccaaagagggacgcttttgaaaatgaaaggaaatactaatgagaaaggaaactctacaataacactgtcctgagaaaactggggcagatggctaccctacccattaaagagctctcaaacgatcctaaaatttgtattgaaacaaaagaccccaaatagttagagcaatcttgaacaaaaagaacaaagctggggggcatcacactacctgatttcaaaatatactacaaagctataggaaccaaaacagcatggcagtggcataaaaacagacatgtggaccaattaaaccatagagaagccagaaataattctctacatttacagccaactgattttcagcaaaggtgccaagaacacacaatgggaaaaggagaatctcttcaataaatggtgttagtgaaactaaatatccacctgcagaagaatgaaatcagacccatatatctcactatatgcaaaaatcaactcaaaatgaattaattaattaaatgtaagaccaaaaactatgaaactactagaatacaaaacaggggaatagctccatgacattgacctagacaatgagttttttggatatgacctcaaaagcacagcaacaaaagcaaaaatagacaaatgggattacattatactaataaaacttcttcactgcaaacaaaatcaaaagtgaaaagacaacctatagaataggataaaatatttgcaaactattcatctgataagagattaatatcaaaaatacataaggaattcaaacaactcaatagcaagaaagcaaataacccaattgaaaaataagcaaaaaattttgaatagacttttcaaaagaaggcatacatatggcaaacaggtacatgaaaaaatgctcgacatcactcttctgggaaatacaaactaaagccacagtgagatattatctcacctttgttagaatggctattataacaagtgttggccaggatgtgaacactgtttgcagaaatgtaacttagtacagccattatgaaaaataacacagcattccctcaaaaaattaaaaatagaactactgtatgatccagcaatgtcattactggatatatacccaaaggaaatgaaatcagtatgttgaggagatatctgcactcccatgtttattgctgcactagtcacaatagccaagatatggaatcaacctaagtgttcatcaacagatgaatggataaagaaaatatggtatgtatacacacacacacacactcacacatgcacttgcacacaaacacacacatggagagagagagacagagacagaatgaaatactattcagccataaaatgaagaaaatcctgtcatttgttacaacatgtatgaacctgaaggatatatgttaaatgaaataagccagggacaggaagacaaatagcatgtgatgtcagtcatgtggaatctaaaaaagttgatctcatagaagtggagagtgaacttgtggtttccagggtctggggagatcaggtgtcagggttaaagagatgttagtcaaaagatagaaagaataagcttgagagatttattgtacaacatggtgactgtagttaataacattatgtactcttgaaaaatgctaaaaagagtggatataaagtgttctcagcacaaagataataatgatgtgaggtaatgcacatattaattagctagacttagtcattccactatgcatagatacttcaaagcaccatgttgtacatgataaatacagtacatacaattttacatgtcaattaaaaaaataaggataaaaaaatagcattcagaggggaataactctgtcttcctccttttccagacctttggttttcttcagatgtgaaaaaagggggcaattttcacaaattctgggaaggcagctatcaaagacatgcagatatggtgccttagctagctgaaattataatccactgggactcctaggaaaaaatacaaaatgcacatgtgtgttcaaggtaaactccatgatgagacataaatttgaactgcaaatcaaaaggtagacaagttttacaaatgggttatgaatccagggattcagcttaggcaaaaggaaactacttggaagcaagtgtatggaaccagatttaaagatgaaagggaaggtctggaaaaggatgtagcccagtgcttctcaaactttaacctagataaggatcaccttgtgagcctgaaaatgctgattgattcagtgtgtctggggaagggcttgatgtcctacatttctcacaagtgcccagattatgctgacgctgctggttcatggaccaggcagaggggcagagaggggagaagtccaaatgcacaatctaagtgttgattcttgaatgacaaagcaatatttgaaaggcggagcaaataggcaacctttttcctaccagatattttactaaaatgctgacaaaagttgaggaggtaagagaatgagtgaagtaatgtagtagtactgtatagaactgaaaaaatacaagtcaatctctaaaggtgaccctggagaactgttgccatggaagaatatgatcccagtgttaccaaatatctcagtttgttaagagaaggcaggaattcagactttattttttaacattaaatctgctgatttgtaaatcttgactcaaattaagcacatagacttataacactgtgaatcaaatatatagaattgccttgccagacttggctatcagcttgtgactgcttcatccaaatgatcaaacacggtcaaagggtctagaatgtgagctcagacaggtagaaactagcacataaaggatctgggggcttgttggtataccaactggctgaatactatgaattagagttcagagaaagggatgcattatgaggagcaaggatcagaactcaaatatcaaggaagtgtgtaaagaagattctttggatatagaaaattgatgtcaggaggtgttgtgataagacattatagtcaaagtgaaggtgggtttgaatgcaaaatgaggattcttcaattattttcaataaacaactaaaagtcactgacttttggttgatttcagtcagggctgagccacttaaaatatggaagtattctgggccaggtaataatgtgattattgaaattttgctttttattctgtcaccaaagttgtgccatcttagtggactatgactctccacccaaaggcccatgttgacatggatgttcaacacttaaggcagggggtgtatatggtgaacagaaccagctagcactatgtattctatttattttttgatgttttagcagaccctcatagattggtgctccagatagttgtcagggtggctagacctgtatctggctttctgtaagggaatgccaaatacaaaatggattcttggaaagtgacctgatattggaatagtcttgcctgcagtggaggaagtgggtggaggggcagatttgagagatataatgactggggaataaataggatcaagatagtggctagttgtaactagagagcaagattaaaagtggtccattttatctctgcaacctaggttcttacaagtatgatggaaaacataaagtcataacaggaactttcaggctatccatgtgttctcattaagagaaaatgcacaacctttcttccatgctggcattttaatttaagctagtatacacaattctctctagagctgttcaggaagatccattcaaggctcagctttgttttgttgttttattgtttatcaagatggtagaagcagactctgtatgaaactgtcaacatcaaaacactttcattctttctcctttaaatagataacacaataaaggtactgcctaatcctggcttattaaggatatcttagaaatgcactggaagtgtagggatgctggtcaagtaaatcccaagccccaaggactcaccctgaggcagttgaatcagacagcagtagtgccagacaaaaataaaagcttaataacttcattcaacctaaacagcagtttttgtaaatttttcaaatgcaactcagaatttgcagagagtaagcactgtgagagcaaaatagcaccatttgatagctgctaacctttactaaagacttagaacgttccaggtgatttcataccaaagttatctatataagttaaatataatgataaattttgaccatctcttaacaatgccctaaaacatgaacctatagttttatactaagcaaagcaacagattctattaagagtagcattcaggctcttccatgccacacaacttgtcatgtcttttctctgagacacagtacggcaaaggtttctcctaggttggttttccccttttagttagaaggagaggaaggcaggagtgcttaggtcccactcaaccaggcaccaaggaatgcatttaaaaggcaggtatcctgcccccaggggaaaggctgtaacttggctatttctgtactctggaagtatgggggagtgcattttataggccaaaggaaagtgagtagaaacatctatatacactaatatgagcaagaaaatggactagattatctcttttgagggaaatgtgaaataaatgtaatgaatggggatttttttctccctttagttttttatgtttattaaattttgcttcttagaacttctaagaaatgagtatttgagggcaactcaaagatgcagaggtcttcagatcttcttacgttctctgtgacatggctctattaagcaaacatgtttgtgtttgaatgttgacttctccagcctcataatatcaccttttgctttgcatttgttcttaccaggaagcagaatgtgcctacacactctttgtggtcgccacattttggctcacagaagcattgcctctgtcggtaacagctttgctacctagtttaatgttacccatgtttgggatcatgccttctaagaaggtaagtcctcttgccaatgtcataagttgatttcctgttttgtattgagatttccattgagaaaagttatttttaaagggagcaatcatctcgttggtaaggttccacataagtcccccaaacttccaactgtttctcctctctggcattctgcatgtgtgtccaccttcaaagaacaaacacaagctgcagcttcttgagtcatgcatgtcagtgggagaaatgtatgtcccctcttctctcactgacatctatgcctagtgcctccctctcaaaaacagggaaatttgttgacatcctccataagctttttatattcagcagaattcagcctcacggtgttggaaaaacaattttgtttttaatgaagaaaaagtttccctgttttcatttccagaaacctgccatttcaaaagataaagccaaactaatgttcatgtatagctccattttgttcttgctgagaggagtttattcatgctaagaggtgtttatttgttctatacaatctaagagtacccatctgaagaaagtggatttggtttcccaaacgcattgaaaccagtctccagccacccagtgaacaactgtctaaaccacagctgaaacaatctcaagaaagatgttaagttcgagataccagtcagtgcaatttatcacctttggacttctatcttctgcctgggtctaacattgctctcttgaggcttacctgtctgtcattttctttttaacaaacccttgattacatttcttcctgtgaaaggaatggttcccttctttattttcacgtccttcttcctgattttggagccccagtcgatctttttgcactttttatcctccctgatcctcttttcttactgggttttcccctcccacctaacttcgagtcttttctttctaatggccattgatttggaagactggccagggctgtacttcagttcctcttgcctccaggctgacattctgctgccgcatggaatctcagagctataatctattaagcttcttaaatgcttaaacatgctatatggctttcaatatcgggaataaaaaaagaaggggttgatcagttgttaaaaatagggtgtcaaatttttaacccttgtcccatgggcttggatggttctgtgtccagagacaggtgtgtttttaacagttatacctttgtctgttatggtttagtaacaataaaactgactaaattaactgttaaaaagaggctgaagtagaagtgagattcactggactcatggggcatttctgtagcaagctgttatgggaagggacatagaaacattagagggaagcaggagggaagggtgcctgggaagggctggctttgtaggagctgccaaggatatatacgtctgcctctttgtggtgtgtaagggcctgactaaaggcagcaaaattgtaggtgccaatggcagttttgcatcactgtgactgcagacacctgcccaacagtcctttatccccagactaatttaacagtcatagaatcttagacttgaaagggaattcttcttggtcacttctcacccagaacagggatcccatccaatatctccaatatctctaacggatgaaatcattcagaaggtgtttaaaagctttctgggttatgggcctctaatatccctttcaaggagatacatattatttttgaataattttaactcataagtaactcagctttattaagcccacatctgaaactcaatcactgactcattaaacttatttctaacatgtagaatttcataaataaaccttagtttttttcatgaaaatgttgcttgaatttgaaaattaatatcatttcctccttatttcttcccaccttgagccttagtggtttccagacctcaactcccatcctcaaatctgccatttccaactccatcaccaccaccatcttctttttcttcctgaaactaactctagtttgtcaatgagacttaagaattaaatgagttaataaatgtaaatttcattacatagtaagtactccatatatgttagccaatgttattatttatacattcacaaaagtgaatagatcattctagaaacattctgagtgttgtaaaggtgaatgagcctatcgtcttccctatggcatttcagcctaagtttgttttaaactttatgtgattctcttcaccttgtaagtttaactggaacttgcagcaaatcatagtccttagaacttttagtggagaaaactgttctcagacttgtgatcctttttgccgacagggtaacttaccttttactaataagttagctgaccaaagctacaatctattatgaatgagctagagatttagtcataagacctgagcttaaaatttgatatttatcactgattatgatcatgtcctttaataattcttatcatctgtaagtgggatgtgataatgctacacaacccattgttgtcatgatcaaattaaataatgtatgttaaacaatgatacaaactaagtatcaagcattcttactaggtttaatattcccagttaaaatttgttttgagagttttaaactataattcctgcccactgcaacatctttgaatctcagatctgtcactgagtaggataccatgtcattaatgccctcatctaagtttagagccctaaacacctctctctttggccatcacagttataactttacctgtttattaagccaatcctaaatactggtattttgctgagcccattactgtatttgaagaatatcaacaaatattaaacttttctcatatttgttgaactaaaccagaaatctaaagtatttagagtatgttcaatttgatatttcaaaacaagcattaatattatcatcgaaaatatttaaatataaatttcacatatatgaatgtgaaaatacacatgtatggagatatatatatatatatagagagagagagagagaaagagagagatataggtgttatgttatgtatttactcagttattcaacagatattcatatggtagtaccctgccagggatttaggaacatatcaatgaataaaaacaggcaaaatatttcctgtctttctagaggaaaggaggcaatgaacactgtatctgataaatagaaatattatacagtatagtgagctagaaaggtaattttgtgctatggaaaagatgcaacaggatgatggggatcagagagaatggtagttttaaataagatggtcaggttagacctccttgagatagtgatacctgaagaaagacttacaggaaatgaaggagttagccatttgaatatttggagcatgactattgcagaagaggtaacacccagtgcaaagaccttattgcaggtatatctgcagtgtaattggaaaagagtaactaaaaaggagaatgacagattaggtcaggtacataatgtaatgaggcaatggaccaggtagggtcaaagtagtccattgcaagattttaacattgaataaaatgggatcttttgaagagttttgagcacaaaagttaaatgatcaacctaactttgattttaaaaaggataatttgggctgctgtgttgagaaacaagacagaaagaaagagacaggtaggaggttactgcagtaggtgagagaccatggtaattcagaccaggggcagtagtagagatattgaatgtattgctgataaaatttgaaggtaaaatcagcaaactttcctgattgattagatatggcatatggttggaagaaaagtgtcaaagatgcctcacagcttatctgccaattgggaaaatggagttgctatcaattgaaatgggaggaagatgggaagtgcaggcttactctaggaaaggggctgacacttagagttcagtgctggacagaaaagtttgaaatacctattagacatctaagtgaagatgttgagtaggcagttgaatacaaaagagtccagagttcatgagagagagctaatctgcagatataaatctgagattcatcaaaatatagatggtatttaaagccctaagacttgatgagatcactcagggagtgaatgaagatagagaagcaaagaggacaaagaactgacctctgcatagctataacagtaagaggcaaatgagaagagaaagcactagccaaagagactaagaagaaaaggttattgaggtaggaggagaaccaggagggtgtgggatcttggaatccaagtgaagcaaatgttttgaagatgaggcaatgattatgtgtgtcaaatctgctgataagtcagttaatgtgaaaagtagatattggctattggatttagctaaacaacctaataactaacaaagcaccttttaaaaaatattatctcatttaatttgcaaggttggtgtgaggtaatatttaatttttacaactatttattgatttgtagaaaggttgctgaactggtaaattacataactaagagagaactcaggtgctctgattgcaaaagcccatgctttttgatgaaatcctattttgagacagaaatataactatgttgatcttgcaaatagatatcaaattttattagagatgttatttgacatatcaattttgccttgagaatagttatatttatcagtgtaatttacaaaccaacagcaccttcttctattacctccctggacaagtaggccataaacaaacacatctgcctgaggctaatgtttcttctcaaatattctgactgatgaaaaccatagaataggtactacaatgaaaacagagaatgtgaagtttttttcttaagtttaacaactaattttatttggactgcaggctgtagtttgtttgcatggtctattgagaaaactggcaaactgtgggcctgaaggccaaatcagcctgctgcctaatttttaaaataaactttttagtaggacaaatccatagtcattcattgacatattgcctttggctattttgtgccatgacagagttgaataattacaatgaagaccatatggccaaaaaagtctagaatatttactgcttggccctctacaatatgctaactcctcatataacccaaatcagtaacagcaagaatgtctcatagtcctggacttctttctgtgtctaatcacttactaataatggcttgcttctaagtgtttatttgtatttttaagtaattctgcatttattcttttatttaattctcagagtattggtaaaatagggtatcttagcccattcagattactacaacaaaatacattaagctgggtaaataaacaacagatatttattgctcacagttctggaggctgtgaagtccaagatcaaggcactggcagattgagtgtatggtaagggcttgctgtctgctccatagatggcatcttgctgctgcatcctcacatgatggaaggggcaagggagctctctcaggccccttttataaaagtactaattccattcaagaggttggagtgaacatatttggttccttttaggtgccaacatatgaatttgggtgggggacaccaacgtttagaccacagcagtcaatagggcttatttccatgagccaaactgcaaaagagataagggaaaatgaaaacttaaatctttattcatttttcaataataaactcaaggatcagctcctgtaagaagactttcccaatccctctaggaaaaaaaattatcaccccacttacttttaaaatctcaattatattttggagaggtatcattcaagcatctataatactttattgcactttttgttaacttgttttttctcatctaatagcttgtaagctctttaagtctagggacttattaaatttaacatccattgagtgccagtttgtgccaggcatgtgctaagtccataaatacaatgatcaataagatacatcttgccttcaagataaatctagtgtaataaaggggataaataagtgaagaaattatcaatatataaattaagatgtactataaaaagggagatattatctaatccagtttagtgtcctagggaagatatcttagaagaactgacatcttccatgaaggaagactagaagtatccaagacaagcagagagggtcattccaggttaaattgcaagcaagtgttaaagcacttctgtgtttggggaactaaatacataggaagaagaagggtggagtggcaaaaaactaaattggagaagtgaaatgggaccagatgatgaagggtcttttatgacatgttgaaaatattggatttggtctttaaaactatgggaagttcttaaaaactatactgaagaagtataagaaggacaattatgtgatcagatttacactgtagaaaaggggctatgacaatggtatggagtggatcagaaaaagatcgatcatacagtagccaagtgagaaatagtgaggaacttaatcaaggtagtcatgtgtaaacagagaaaaagggacaaattttaaagatatgaaggacctaggaataataggacttatattggaagtgaaaaaggaatcatggctgacctttaggtctctgtcttgggcaactgagtagatagatgtttacattaactacaaagggagaatgtgtttgaaggatggggagtgagaaaatgagaagtgtcattgtggatatgttgaattgtaggtgtttgtgggaaattcaaatggaaatgaacagttggacatatcagtctgaaactcagaagacttatctgtgtggaaataaagatcttggtgtagtctacattcatttaacaaaggttcattgagtgcccccatgtatgtgccaggcattattttagtcccataaagttgaatctttcaaattcagtcattggatggataaaacaaggagactataaagactatggacagaaccctgtggaataccagcattttggaggaccgagataactggattttcaaagttagaaaaaaaagaaaaattcacaggcaggtatagaaccagggagaaaaaaaaaaaaaaaacagcttcccgactctggaagcactggcaaattaatatactgaaatacttatacctagagtaagagttgaaagaggtgggagactaggaagtagaggacagagtgtagaaaattgggatataagagctcagagaccatagcttattcattgtccctctctccctcattctttcaattctatttaccaagctctctactgtgtaccagcactatgctaggtgcaaaatacgtgatggttagcaaaatagagtcctggtttggctagcaaaacagattcctggtcctcatcagaatgtatggtataatagagaaaacaataagcacgtaaacaaacagtatttacgtaatgtatatactacgaaaaaaccaaacacggctctatgatacagaaaaatataggacctatttagaaaggcctgatatttgagaattgaagaggtgcaaagagggaaaaatttatcaagcatttattaatatatactctgctcctataatatttttggtgcatatggataatttttcaatgagtaataaatgaaatagcaaggaaattgatataattattttctattatccaatcactacaaaatgtaaagagatagatataaactttgaaagacatcataaatgaacattttataaaatataaaagttgtccacttgcctacttttaatttcaagggtaattatcaatttttgctttttatcgaaacgaagccaagcttagcaaattatgttaaaaatgcagatataatttaatatagcaaaattatcataagaattgattttcctttttgtggttttgtaacattagaatggttttattccaacattcccattccttctattagctattgtttgatttttttagaggggcatttactcttataatcctctttcagcacagccttgtgtttcagtttagccaagtgcttcttaaagtaagttatcttgaataccactctcatgaagtgctccacctaaaaattaaataaaaataagtttttaataattaagtaaatctgaaaaatatgtagtatatgatatccccctctttaaaaatgacattatacactattgtttaaaggtttttgcaaaggcctataggagagaaagttctagtatgtcaaaattctgttttctcaacctaatcaattacacaacccttttaaaaaaaaagattatgtacctaaatgtatttcaaagtattctttaagaaatactgctgcaaatggttgcttaaagttctaggtcctttactaatctctgaatggtgttgactgaaaattgcttaaaatattaagtctcatttgagggtatttgttttacaattttattattattattttttaagatgaagtctcactctgtcgcccaggctagagtgcaatggcacgatctcggctcactgcaactccgcctcctgggttcaagcaattcttctgtctcagcctccagagtagctgggattgcagtcatgcaccattacacctggctagtattttgtatttttggtagagatagggtttcactatgttggccaggatggcctcgaactcctgacctcaagtgatccacctgctttggcctcccaaaatgctgggattacaggtatcagccaccatgcctggccttataaaaagtaattttgaaagtaaaatcattcaatatataaaggtgtgactgcagttacagcataatgggtcatgatgaagacagtagtaagttggagcttgattgaaaacgttcccaaatcacagtcattgccattccactatagatgcataaacaaattagccccaatagaaaagcacttacctgatgttactcagctatttaataaccctgagtactcttttttcggtatacttttccttaacaccatttttgagtaagaatatagaacatgtctaaatttgtattcaaacacatctacatttttctcaacaaaatggaaagattatgcggttgaaggtcaaaattaagagcagcataataatgtctttcttgtgcaatgttatttttccccaccaaagtaaataatcacgggtttaattgttatttcaggtggcatctgcttatttcaaggattttcacttactgctaattggagttatctgtttagcaacatccatagaaaaatggaatttgcacaagagaattgctctgaaaatggtgatgatggttggtgtaaatcctgcatggtaagtactgcatttactgcttccagtttacctgctgaacagaccatttttgtgcagagcaaataatcaaataagtaattcacgcccaggaaattctttgtatcacagtctgacttatgacgttttttcctctgcaaatatgaaagtgatataaagtgtacttgagttgtaggaggaaaaaaaaacaactttcactgcaggtctgattacagggtgcttggaatacgtgcacacaactttctcaccttttatgcatcatagaagtcaaagctgagagaagctttgaacctcaacagacaagattgatagacttcagagtagattttcctccgatcttgtttatttggctgattacacattcagaacttgttcaagagcatcctttatcatcagggaggatgttacaaaccaaagacaaagacattactgacaaaatacaaatgtgtgcagaaaaattccaaggtgaatatttttctttttaaaccaactgttgcaaagtgaaaaaatcaattaagacatttcatctacagagtatgaaatcactcatttgactgataaaattaattggctatttcggttttatttcacttcttgctaagaacatgaatgtaagctaaagaaaatttccagtgtcataatcatttgcatagtggcattttgcgttaaagccttagatgtttcttcccttctcatctttctttgaaaattagaatattgtattgacttatattgcataattcattctagggcgtagacacatctgtgtttttcatttatggtgcaaattgttttgctaaatacaaaaaaaaaatgactcagacgagacaaattttcaattttttttttacttaaaaattgtataacacatatgtgtttaagacattatctcggccgggcacggtggctcatccctgtagtcccagcactttaggaggccaaggtgggcgatcgcctgaggtggggagttcaagtttagccgggtatggtgacaggcacctgtaatcccagctactcgggaagctgaggcaggagaattgcttgaatctgggaggcagaggtcgcagtaagccaagatcacgccattgcactccagcctgggcaacagagtgagactctgtctcaaaacaaacaaacaaacaaacaaaaaaaaccaaaacgacgtcatctgactcttaaaatgaagtggggctccatgccttttagggtgctacagaaatgtatctctttttcctgaccctctgctcactgttccagaggatgatgtaatgcacttcacagtggggcagaagttctgtccattatgccactaagtggctcttcaatttaaggcattttcaccatccagaagctttatctgatcctggcattttttatacaaagatttcttgttttgacaatgccttaagaagttaaaagttcttaattttcttttttttagaagaaccatttattgcgtaagcagattcctaatatattttcttttattttgttgtatacattgaaaatattcaccttatctgagtctgaaacttacagtgtggtattgttcttgtacatctgttttaaaagggtgtcagattatttcataaattgctctatatagaaaggtgtgcttctgaatgattttctaggcccgcctactcaaaagagatcatttttttccccaagtgtgactttgaaagtttatagatatggcttaaaattttgtagtcttaggtatattatttttaaggagaataactaataactactctatttataaaagaagacaatgtagtgtgtccagatcttgacaataggaaaggatatcagattcaggggagcataaatcagaatattcagaaaattcagaaacctcattttagcaaatgactttaactattttctccacccaccttatactgaactagtatagtgaacaagtaaaaagaggctttataaatattaatctttctttgtccttgtacctccttgacacccctatgaacagagttatggctaaaagataaaagaaaaaataagggaccttaaattcaaaagttgattgcagtttcgtcttaatagcatttgaagataagtggtcagctgtgaagagcattcagatattggtgtaatattataagctgttatgtcatataaccaacttgcagttcgtttagttttaatcatttttctgtttctgaagagaaaatttgcatggttccctgggagacaaatctcttaagaactccacttttacatatatggctttgatttctacctggctgtcacggtactccaatttcatcatctgggcagaatcttaaccttccatgttttgaaagacttaatttcccaactcacaaaacacatcttaaacatcttccagttaaataatacggtgctagttaagctaagagcacagctccacaataatggctctctggtttcaggctgacgctggggttcatgagcagcactgcctttttgtctatgtggctcagcaacacctcgacggctgccatggtgatgcccattgcggaggctgtagtgcagcagatcatcaatgcagaagcagaggtcgaggccactcagatgacttacttcaacggatcaaccaaccacggactagaaattgatggtatcacatgttgatatggccaatctggggtctagtcattagagcaatagacataaactcaagaattctaagttgtattttgaattaaccatctatacatgcatgatatgaatttaactttcttccctctatagttctcagtatctacaaaaatagttttctacaaatattttacctaaattgttacatttctatttgcttgcaaaaagaagaatgccttttctatccctcagccagactgatggaacactctctcatgtctttatcagtagacctccaggttactctttcctatactgaaatggctttcctgcataatattgggaatctttaattcctacattctatttggatacagcatcaaatttcactgttattatttctggctctgactaactgctctgatgcagtgaaaaagtgttgggaggatatttgtatttataaaataagatgactgttatgttagtacacagtgaattttttattttcaatttctactaatgcttccatcttcgcatccacacacaggcaaacccaatgataatcccttatttaaattgtttttcttttatttaatgttttgcagaaagtgttaatggacatgaaataaatgagaggaaagagaaaacaaaaccagttccagggtaaggaatactgacattttgattgggatttttccaaattatattttaataaaattataactggatcaatgtatttttcagatacaataatgatacagggaaaatttcaagcaaggtggagttggaaaaggtacataaatttgattctttctaaataattatatacaaaattatattagagctgtagttagatacatatgcattttaaaacctgccacttgcttccttttctataaattattttgcttgactaagcagtagcatggtgtaatggtttgataaactttcatgaacagacagaaatcaacatctggataggaaccattttaggctctgaaaattagtatcattattttctctttttaccagaatcaggataatggcagttagccaaggtagtttaaagaaatataattccagtctcagaatattgcttcattttctttttttaacttttattttagtttcaggggtacatgtgcaggtttgtagtacaggtgaattgcatgttttgggggtttgatatatagattatttccttacccgggtaataagcatagtacctgataggtaggtttttttcatccttctcttattaaaatcttgctggcctaatagactgattttcattaggggcatcgtcgtcatttcttccaggttatgaacttggagcaactcctattcatgtaattacaactcgttatctttagtgcttccattgccactaaaaaaaatcaatgcagaattcatgagttgcttctgtcaaatacaggtggaggagttgtagccattctagatattaaaagagggaaggagatctctgtaaactatcccatagaattcatttccccagaataaatcaatataaaaatactatactagattgcactgggagcaatatatctcaagacctgaaaaataaatcccacatagaaatactcctatagtaactatggcattaggaataggaaagtgggacatatatttcttcatctggccatggaatgcattaacaggcagttcaataggaaaaagaaaaccctcttgttaattacagaaatcttctaggaaagagcaatttctatgtaaagagaaaatgaatacaaagataagttttaagccattagctacagaatatattaaggattttttaagatgggaattgcatatatatttatgaagatattatctttagagatagaaataattcctataaaacatgaaaaattaacagtatgccaggtatgttatagaataatacattagaaatgggctttatgtgcctgatttataatcctttgggtatatacccagtaatgggatggctaggtcaaatagtatttctagttctagatccctgaggaatcgccacactgacttccacaatggttgagctagtttacagtcccaccaacagtgtaaaagtgttcctaattctccacatcctctccagcacctgttgtttcctgactttttaatgatcgccattctaactggtgtgagatggtatctcattgtggttttgatttgcatttctctgatggccagtgatgatgagcattttttcatgtgccttttggatgcagaaatgtcttcttttgagaagtgtctgttcatatccttcgcccactttttgatggggatgcacacgtatgtttattgcggcactattcacaatagcaaagacttggaaccaagccaaatgtccaacagtgatagactggattaagaaaatgtggcacatgtacaccatggaatactatgcagccataaaaaatgagttcatgtcctttgtagggacatggatgaagctggaaaccatcattctcagcaaactatcgcaaggacaaaaaaccaaacaccacatgttctcactcatagatgggaattgaacaatgagaacacatgggcacaggaaggggaacgtcacacactggggcctgttgtgtggtgggggaaggggggacggatagcattaggagatatacctaatgttaaatgacaagttactgggttcagcacaccaacatggcacatgtatacatatgtaactaacctgcacattgtacacatgtaccctaaaacttaaagtataataaaaaaaaataaagaaatgggctttaaaagctgttatgaaaattggcacacctaaacagaaagaatatacatgcattcagtaaatttcttgtggtcatctttggaaacctagttttctatcataaggcctaaagtttcagtcaaaaccattcaaattgatttgatatccaaatactgtcccaggcattgtaggcaggtcttttgatgaaaagacctgctccttattgtaagcagctcagagtctagtggacaagacggacttataaaaatatgtctgacataaataccacaacaaaggcatgcacagatgccaacacttctagaagcaggagcaactagtttgatctgggagtactgcagcgaggaagtataatgtaaagacatttgagtctggaaagacgagagcatgtgcaagcagaagagtgcgaactcatgagtgcaagaatgtgtctaccttgtcagcactttaaactctggcacattcccattgcctgacacaaaggatgtattcgataagtagttatctttatcaattaatgaatgagtgaaagcaaaagagtaaaaagaggaagacactttctaatcagagagtacaactaattcaaagaaccagctaagtaaagaatgtttttttttcaggaaacctctacaatgcagatgctagagatgagctgttgtggggaataaaattattgtatgggtttgtccaggttataaatatctcttcatccaatgcaaaggagtttagagttgattttatggaaaacgcaaagccttaaaactgcggggcaatatgataagttctgcctttgggacaacctgaaagtcagtggtgagctttttgattaactgagcaactgagcttttttattaattagacattggggacgagggaaaaaaatgtaggagatgcctccactgctctaaactagggagcggtagattgtgatgccattgattagaatgcagaactcagaggtaagaataacctttcaatagagaaaagataacggagatgcatttttggcaataaagattaatatctgagtttaggaaaggaaagcgaggcttttgaatgttgattctatggtctttccagaatgcaatgcacaaaaatttagctttatataaaaacaggaatagttttttgctgcactaaagtattctttataagacatgcatgaaagcattattttatatattatacatttatgatatgttttgatttttaacaattataggtatattttcaggaataaatgtatatataatttgtgttacaattataataaactgcagctgttctttgatagatttaccctatataatttaacactgattatatggaagaatgtatatctacttcatctagctataaaatatttatattcataatcttttgatcttatgctttcttcttgaagtaggtaggatattctattgaattaaaataaatcctgtggggtttgactttgaatttgacctacaagtcaaaaaaaaaatacaaatattactctttttttggggagagtggtataaattaaatttcagagaagataaatttccttcagttcagctctgattttgattatttcttgtcttttgctggctttgggattgttcttgcttctctaatttttttcagttgtgatgttaggttgttaatttgaggtctttctaactttttgatatgggcatttagtgttatgaatttccctcaacacagcctaacactcatgacatgagtttacctatataacaaacttgcacatgcacccccaaaacctaaaatgaaaatgaaaaaaaggaagagaaataaaataaaaggcttagctttttttttggtaatctgcacaattttgctatgttcctgcaataaaataaataaattttatttctaatgaaattattacaatttgattcatttgaagcaccatttatttagtacaaaactaaagattttaaaaatttaattaaaatctctttactaatataattaaattaatctaagctgatcaataagcttacttcaatttttagaactataatatttctccccaaaggcaataacatacactgatccatataaagtttagtgtgtagtaagtagaaaattctcaataagtagaaaaaaataataatggcccccaaataaattctgtatttagcagacagtaatattagttaagaaatatacatttaacatttgctcaatgtcaccttttcaacaagacctaccctaatctccctatttcactgcagccaccatatcccatatccttcctcctaatcctcctgactctaccctactttatccaaaagcatgtatcaccttcttacagactatataatttgcttaatttttatttattttgttcattgtcttctttctccactaaaatgcaaggttcatggggcagagatttttgtccatctagtacatatcacaaatatcttgaatagtgactgctgtaaatagtaaatatttgcttattgaataaataaattcagtaatatttttatcaaatgattacaattacagtaaaataactcatgttgtatataaactacactaagtttccagtgtctagttaaccatcagggaaaattcagagaagtcactatggacaacagaaccattaaatactattatttttggctgctttaaaaaaataaactacaccaagcaaagaatcaaactgataaacatttaaagtcaacactatggatcagactggtttcattttgggtagaaagacaaaaaaatgttttgtaactaaaatttatcagctctaaaattcttgttaatagaactgcaaaattctcatacagataataacgatgatcattttgctggcgtgataaagactagatgttagtgttgaagatgatggatatttagtagtccaggaccttattttaaagtattcacatcgaagagtcactttcctatgctgcatatctaaaaaagagatttgtcccatgacttaacttttatgaagttctcttctcactataggccatggcccaaatactaactgagctctctacttgcccaaaataaagtggtgaatagttaccaagcccataaatcccacattaccccctaaaagtagctgaaatatttgtagacaagaaaagatactgggagaagaaaggaatatcctaaaattacactgacagtacctgaggaaatatatttgtcaggttccattggggtacctggtaaaccaaccaccatgcatacaatttccatgggaaatgagttctaggtatccgaaaatccatttgtagataccaaagaaggaataaagttgctagttctttccctcccctgcaagcattaatgtcactcaaagagacagcccagagttttacatcagctcaatttctaaaccttcaggcatctacaaatgaaagagattggaaaatcagtatacttttaatgaaaaatctgagataattgtttttcattagtttaatataagttgtaattcctcaaagggaaaagttcaaagtaaaaatatccttgaataaattacatcttgcttttaattaggtattgtttagtttaggggtgaaaatccttatggttgaaatccaattgtacaagacaacactttttaatgttctccaaaaattcaaaggagtcttgtaagtacagtaataaacatggttcataatattagaaactaggggtattagttctgccaaataaggagatattaattctggaatatctggctcctagatcagatatgaaaaaggtattttagcttagatcacgtaacaaacaaaagctggctctccttcattattcttctattttcctaaactgggagaagttggatggcaaaggcagtaattagtactgctcaacccttacctgactcaacctagggtttccttttattcatgcagtggtttatagagaatgtttatagacgaggtaagcaaggagagagagggagaataccatacaccctttaggaatcacagcaacaatctgtgaacgtgacctcactccagatttcaacctttattagagtcaaagtgctatctccattgatggccattcttagttgtggtctcacaaaacatttttctattaaagaaactattgacttttgacaatatcatttctcccatatatctttattttatgaaatacaaaaatctagttcttcacattttatgttattgaaatattatctagcaaatagcataagctcagccatattagtgatatctgtactttaactgtacaataagccccccacactacatagcttatttgaatactatattttatttcttgaaatactcaacagtgttctcctatgcatcttctagtggtattttctaaaaaaaaaaaaaaaagaaatatgtttgtctccaaattgatttttctgtattttgattaagaaatatttcatgcatatatgcctgtataaaacgtgactaaatattttgaagaataacaaaataagataatgtataccacatcccagcttaataactagaacataatgatttctaaaatctacacgagcctatctcttttccttacagaatcacccccaaccccttgccaagttagctatagtccaaattttgtgttaatcattctcttgttttcttttgttttatcacttgcactagttaaggtatggattggtcgccacagcaaagaccaaatatagcaacaatttcaacaagatagaaataggctggtatagtggctccttcatcaccatgcccctgactctttctatctcttctctgccatttccagcactggaaacttgcagttcaagatggctccccatctccctctgtccattctgtatcgcagctagctgctcaaggaaaggagaaagtggaaggcatatgtacttagaaattattctattactttcctggatttaagagtattcagattttctatttcaacatcaaacaattgcatttttaaaaagaaatttatgtgttccatgtcaaatttagtagtgtgtggttgtttataatattttcttatatctacttaatttctatagtatttatagttatatgtctttatttctaacatttttcttgtgcttttaaagattatttaaagattatttttaaataatctttatttcatttaaataaaatattttatttaagtcttttttaatgtaaatctttatttatcttattttatttaaatctgtattttaaagattatttttcaaataatctttccaaactatgtctattttattagtcttacaagtcttgtcaaagaaccaacttctgactcctttcaccctctctatttaatgtatatttcatattatttttaatagttttctttattactttgttctgtctactttgttggtgtatttatgctcttgctcttttactaatttttaaaatctgacctttaccttattagttttgagtttttcctctcttccaaagtaaggatttaaggatatgaatttgcttctattactttagctattttccatatttttcagttttgtgttttctgatttccattatactagatttttttcactcaaaagatgcttagaaatgtgttttgaaatttaaaataaattagatttttagctacttttaaattttttctaacaatttttctgcggtcagaaactgtggtctatataacagttctctaaaacttgttaaagcagcttttcggactagcacatagtcagctataataaatatttttcattgtgcttaaaacaaattgtacatttttaactaattaggttcgatgttttccaaaactctgtaagatcaagttactagttgtgcttctcaaatctctgtgctctgaccaagttttgtctctttttattcagcaactgatgagactgttttgttaaactctccttctatcatgcaggtattctatttcttctgatacttctgtccattttggttcctctgcattgttaaattatgttattctgaacccatttagaatgtttctgtgtgtgtgattgattaaccttttatcattttgctgtgcacctcttcatctatcttaatttttttggtctttgagtttatttgtctgctgataatacaggacgaccagctttttttttttttttttgagactgagtctcactctgccacctaggctagagtgcagtgacacgatctcagctcactgcaacctccgcctcctgggttcaagcgattctcctgcctcagcctcctgagtagctgggattacaggtgcccagctaattttttgtatttttagtaaagaagggatgtcactatgttggccaggctagtctcgaactcctgacctcataattcgcccacctcggcctcccaaagtgctgggattacaggcatgacactaccagcttttataaggctagtatttacctggcatttcctctatcctttcactttcaacactttatgacactaccagcttttataaagctggtatttacctggcatttcctctatcctttcactttcaatatttctgtgtccttatattttaggtgtatctcttttattatgtttgaaaagttttacctctacccgacatgttttatccatttaaattatttgtgacattatatatttagaataatttctactgccagctttttattttttccaaatattctttccatcttttcttcctgcgttcctatgcagttattttcttttatttcacgctacacacacacttgtatgggtggtctattctatactttgtgtctattttaattgtccaatcattttctatattgttagacagcaaggattgccataacaaaatagtacagaactgtgtcttaaacaatacaaatctgttatattttctcccagttttggaggctagccaagtacaagatcaaggtgttatctgggtcggtttctagtgagacctctctttctggcttgtacaaggctaccttctcattgcatcctcacgtgatgttttctctgtgcacatgcagtagaaagagggatttctggtcccttttgctctttttacaaggacatcagccctatcggattaggcatccttctttgtttaaacttaattacctctgtaaaggcccttttccacacagagtcactttgagtgttagagcttcaacatacgaatattgagagacataattcagtcattaatatcatgtctacttaatatataaacatttaaagataatccatttttttttctcctgaacagtataaagagcctaggatattttaacttagaccatcgctttctatttacatgccattttccaattttttagttctagtctattattcctccataaattacataattgtattattttttaaaatcagtgctctgtagagttatgttcatatttattaatatctttgttcaccattgtattttgcttctcagaccccctatctggggtcatggtccttcttcttgaatatatcttttgaatgtatttcagagagtgattttggtgttaaattcacagtttttgtttgatagatttctataattcttgaaacatgtttttatagttatagtgtgctagataggttattattttttattttgcacattgaaatatatttatatatttctactgccttttggctttctttttttctatttaaaagtcagctagctatcagtcaaattattattcctttgtaggcaatcttttctctttggttgctttaatgatgtgtgtgtatatgtgtgtgtgtgtgtgatagaattttactttgctatgcctaagtgcatatttctcctgaatctgtgtattgatctttcccaacaattcttgcaaattatcaggtgttatttctcaatattcaattgcctcatcctagttctctgtattctctccctctgagtctccaattaaacattctgcactttctcactgtggtttctaagctatttaacatctatttttatgagtagtaacttctgatttatattccagctagttaattttctctttagctatgtctattttgacctatttactgagcttttaaattgttatttaaatttaatttatgtaaactctatttgtcttaagatttgcctgtaacttttataatctttttcatattttcaattgcttctctaattttattaatcatatgtaaatgtaattatattttgtgtctgtgtccaacacctctgaggtccttgtgggtctctttctttgatttagtttttatttatttattgctggttctcattttgttgaattattttcttgcatgttcagtacttttaaacattgaaatttttttttagttactatggaaattctttaagtcctatgttgcagcttcttgtaagagttttcaattatattgctatttctctttaacacacacataacataaattagtgctttaagaaaaaatgctcatggttaggaatttttaggggatattgttttcccttaattcagcatgatattttctttctgcttctgcaaaggataccagctttatgtgtattttcttgtatgattccccacacacatttggcctggagcaatatcttttataccaagctctccttgcaacatgatacactgaaatctgaaatcctattttaaatccagctttaaaatgattgttgcactttaaaagattgtttttaatattttaaatagcatctcatttagcatgggaatctgatttgtcatgctgctggatagaaaaatatgctatgttattatattttgtttcagtcatttttacaactagaaagagcaaggtttttctcagtggcacacacacacaaacacacatacacatatgctttttcctaagaaagtataagggaagcttctaaatagttaacatttagggcaataaaattttttaagtaaatattggatttaatcatgacttttaacatttctgaaaaatagagtttatttataaagaggcctcatgtccttaatgctacattttaaacatctctttattcatcacacacaataaatgtttattactttataaacatatccaaattcacaatatgtaatagttctttattaactacggtggataaaaattctatttcagagtcttaccgataacttcaattttactaccaactcctctgaattcttcaggttattactgattatattttcactagatcttcatgaagagttcatactagctgtaaggagaagatcctctcctacaatttcttgctattcacttatctagtactttcattcaataatttctttacagaaggatgtggggagagtttaggtatcccttgtaagaaagcagaaacacaggaaaacgttgcagagtgatactgaggcccatctgaggtcagaggttgtggatttctcacagcaccagcgagcttagccaagggattttctccagtggcatccaagagagcatagaaattgattttcatattaagctgaagttcagggtccataaagatgggaacagcaaaatgataagcctgctgggatgttgaaggcacagcaggagagttgtcagtgattcatctgaagggataggtttgccctggtaaagaatgaggccttgagaaggtctagaaggacttgagctcctgatagggccaaagagaaggcatggagaagaaaaaggatgggaaaactaaagggatcaactattgtgatcagagcttcgtctaataaagaatccattataaaaaaaatttctttacagaaataatcttcttatagacattttaaaccattagaacactgtaggaaggctggtttaattaaataacataatctgttattaacttaactgaggatctttaaactcaacatgcagaccaaaaggacaggttcccactgtctcaattcctctgtgcactatggaacttccactctcctgttccctttttagttacatcatctaccaacatatggaccacgaaagcaccaaggtcaaaagtgggcattaattattagtaaatatttatttctttaattttgaaatgtaaaaagataaatattgcatcttccattaagatggcaggttaaataggcccatttgttaccacttttctaagtcttcattaaaacaagaacaaatagactttcaaatataatccaaattatataaacatcaagagaagacatgacagcaaaatcattttggaagctggaaagtaaaaagatgagtggaaaataaccccattatccccagtaatcccatggaagctgaatcctaaatcggtaatgaaaaaagccaataaacaattcaatttccatagcagcaggcttcaacatttttaaaatgctgaaaagcaggaggaagaaaaaattgcttgtgaagcagttaaatcttctactttcttcctcaaatccacatggatgcaacagcttctaatccaccaaacagaaatatgatcttcagacaaggtaaaacgggataaggagaaccagatccagttctgggctgggggagggtgtcacaaggaaaacaggggtactgagcgatagcttacaagttgaaaatggagaacccggccttctacctacactggtccaggagccaagtctatgcctttcgggtgtcagcaggcagaaggccagatgatgcttccttggagaacacaatcagcgttaagagagatgaaaacattgaccttagaattttctcaaaaaaaggccaagtcagatgacattacagtgaagcttacaggcaacaacaaatcccaaaatacgagtgcagagcttctacacaaatattcaccgcctgaaatgtgagcagacaaccaaaaattcctggatatctgatgaaagcctcaattatgaaagagagattgccaaataaataaaaagaaaaaagagcaatttgcgggaaacagagactatgcaagaagaagagactataaaaaagaaaatatcattaatataatcagagaggcaaacaaatatattacttgtatttatgaaatacaaatacaaatagtattctataaaagagaatcaagaaggcaaaaatacaaaatatgtaaatataaaataaagtataaatgtaaaatatagagatataaaagcataaatggaaaattcagtagacaaaacagaaagaaacagaataaacaggaaataagaggagtttccaaaaaagaataggaaaaaagagaagagtatattaaaaattcaagaaagtttctacaatggaagagtacaagttttatgattaaaggactcactaaatgtcatcaaaatgaatgaagcagacccacacagggcaggtctgttttaaaatctttgagttttcagaatactataagatgaccctaaaagctctcaaaaaggaagaaacactaattccttacaaaggatcaaaaatatgaatgactgaatacttctccccagcagcactactcagagacagcagaaaaactgccttcaaaattctaagtaacatttatttccaacctagagtcaatatccagtcagacttttgatgaaataagagggaagacttaagtctagatagctctttgcagttctagagaaaaaataactaggtttgggacaggaaaggaggccctgaaagagatgtcatcaagacaataaaattggcagaatattgatgtgaattaggtatcctatcacttgattgttctgagagaatgtttaagcaaccagggaatatttgggactgattcagtagtaggtactttaaaaaataagcaagtaaaagaaggaaaagacatattctaacttacagaaggggcaggaaaagtaatgtatatcatatttctagctgttaatagagctctaggcaacatattgaaaatgtgaagtctgtactataagcaacattatgacagagccataattggaggatgatacaaagtatacgtattcagtgaaggaagctgtgaaagaaatctgcaatcgttgccaccaggtggcaatagtgagttacatctggacctgcaggatttctgttgtgacaggtccactgtgatgatgtcattggattctgcattcggtcatgtcctcataggaaatttttcagttacttggaagaagatgtggaaggcatactccacatgtatggtagacagaagggattgaataaaaacacaataggttaccattgtggtaaaagcagtatgaaatggaactcaaatgtagttttaaaaattcatagaagtaaagtattctggaaggcaagttggtacaggggaaattcactgagagagaactcacagacatggattctgctttcaagtctgtagtaatcagctgggtcacacttgagactcattttgcacttctgaaatattaggtctttacaccatataatctctaactacctgtctgccctaatagtctataattcctttatatgttaaaaaaacttatttctggcaataaaagttacaaaaagtatcaagaaggtggaagataccactaagctcatgattaagaaataactatccttaatattttgatatattttacttcagccacatatatatatgtttcatttcaggcacatgtgtatatgtagaaatattttttgttttaaaattttacatcattttgtacttttcacttcacataaatatccttatataacacaagtacttttccattcataatatacctgtgacaatgtcctgtggccataggctgaaactactatctaggcagaagactaaagattaatctgctgtgatacctgccccctttgtataatttctgtaccactagttggctcatttagtggctcatatcaggctttcttaagagccctatttttcagctcagtgccctctgctactgtccctctagtcctcatgctttaccctttacttcagtatcatctcttctgtgttcagcccagcgaacacaagcactcggtaaaaataatgataaatctgaatgcatggagctcatgtttactggctagattaaaaaaatggtgcattcaccattccacttcaaaaactcctcctcttaacctttaatttgcattatgatatattagtgttagcatttactgtagaatttttaccctgaattttaatgcctttataaattgttgatgatatttgcataaacatcagctcatgtgcagtagcaataatgtatattttaaaggtccttattaataaaaaatgtgtggttaattcataaggcataaagcatggcaaacatattaacctgtttctgttttgatttttttgttttatatcatccagtgtcttttaataattctatatatatgcatatatttacagttaagcttttatatgaaatccaattttttctttatttatatttttgaaagttttaaggtggcaaagggaaatcatataaacattgcatattttaagtttccattcttattatcaatttaataatattcaaattatgcatcactttctggtttgtgtttgaagtctttcctatagtaaactatttaatgttaagcctcaaatttcaattgccactttgtatgactcataagaatttttaaacttatttccctatcttatttacataccacttattttgtgtcaaatttcaatggaatgttttatcatatagaaaatacaaatgatttctatgtataaaatataagggaaagggagacgtttgtaaattagtttattttgggtgaagcgtagagtcctttgtgggctgaccttaaagttaattagaaagtaaaaggtaaattacagtccaatgcacctgactctgccatgctaaatgccattttcatatctatgatgacttttagtgagtagtaattttttccttatcacaacttttcaaaaagatattttaataatgtctcaaatagcatgtttatctgtatggaagatggcatttcttctgttcatcctggagaagggagaacccttgtacaatgttactagcaatgtaaattagtgcaaccattatgaaaaacaatatagagattccttaaaaaattagaaaaaaaatagaagtaccatgtgatccagcaaactcacttctggatatatgtacccccaaaatgaaatcagtatgtcaaagatatatctgcttccccatattcattgcagcattattcacaatagccaagatatgggaacaacttaagtgtcccttgatagatgatgaatggataaagaaaatgtggcctgagttactgtaacaatccttttatggttgtgcttgcattaattcttgcctatttcagaactctcctatacacagcagcctaaaaaatatgtacaaatgtatttaagaaatacacaaacacaagaagacaaaagataataagtgtttatatattccttaactacatttagattcttgtaatcttttagattacaaaatctttcagattttgtaggctgcagtctgtagaatgagtctgtaacaggcaagagttgatgcaagaagatctataaacacactatttcattaacctaggccagagataatgttgactgagaccagggtgacaacagtggaggtggagaaaattgaacagagtccaggcatatttcagtagatacaattgacagaatttgacgggatgaggaagataatgtttttgaggaggacaagcaatacattacagcaaagtggctgagagtatgagctctaaagcaagactgcatggtttcaaaacccaagtctgtcattttcaggctctgggacctcgaacaattcacttaacttctctatgtcttttatttataaaatgacatcataattttacccacctcattgtattgtaagacgtaaatgaattaaaacatttaattgattttaacttggacagtgcttattacatgctaaggacactataagtgtttgttgttatagtgatggtgatgacatcagcttatataagtgatcctgacaaactaggtttgacaaaagaagtaatagccttggtcctgaacattttcagattggagttttattgaagatattatacatatacatatatatatatatatacacacacacacacacacacatatattcaaatatatatatatagttttgttttgttttgagacgggtcttgctctattgctcaggctggagtgtggagtgcagtgatgcaatcttgactcactgcaacctctgcctcccaggttcaagaaattctccttcctcagcctcccaagtagtggggattacaggtgcctgcaaccaagcatggttaatttttgtatttttagtagagacagggtttcaccatgttggccaggctggtctagaattcctgacctcaagtgatccacctgcctcggcttcccaaagtgctgagattccaggaatgagccactgtgcctggccctcaaattatgttgaacaggcaattggatacatgggtctagatggaggagcctggctgaagacagaagtttggtgatctggcataaaaatagtcattaaatcaataaaaataagatatttttaaaggagaaacattagagtgaggagagacaagggcctgtgacagcttaaagaaattccagttttaaggaaggatggaaggcaaaataactggcaagggagacagaaaaacaggcagagatagaaaaatccaaagagtgagatatcacagaaacccaaagcagagttttttcagtaaaaagaagagataaactcttttagatgcttgctaaggggactacaaagttgagattgaaaggttcctattgaacttagcactgaggggattactgataatcacaggaagtgcattgtgggtggaatgaggagacaagcaagatggaagtgtctaagaaaatggagtcagtgaatgtaaacaactctttcgagtagtttggctgtgaaaatggagttaggacaatagtttacttgaaaggagggttaagaagtctttcttgtttttcttctgtaaggatggctcaaaaataattaaatgttgatgaaaattccaatagtctgtagtggaaggtttctgagaaaatctgagagactgtggtccagaaacaagaagttggaggagaaacattgactctattaattatgtagagaacaggaagatggggcaaatgcaagtaggtttctacatttcacagtgataccattgtctgctggcttctattttctctgtgaagtaggaggcaaagctacttgtaaagactgagaaggaccattaagagggacgtatagagataataaagaaggttttatatttccttgtggaaagaggtagagtaatttggttatgcaaacacagtagggtagaggagcaacatcattacagcactggatgtttgtgatcatgaatgatcccatctgctctactgtgcatgtaatttttaacaacagtagctggctactcagaagcagacatgacatggagagagagaatggttgggtttataaatcagttggaattttcataaagaactaccattcaagaaaagacaagaaagagagtttggagtttttttaagaaaatttattgaaatggtgtaccatggaatctaaactgaataaggatggaagtaaagaaaggagaggaccataactgggcataactacatactttattgacttagatttgccagtgcagttgaaggactgtagagatagaattaattcaacagcaaagttggaagaagaaactgtgataactgtgccaatttcttgataaccaggatggtaaaatgatactctttctacccctgagtaactataatatcaagcacacacttaggtatttttgcatttcatttccacagtacttgcaagtgaggtgaccaaaaaacagctttagactcttaaacttagtgtttaaaatgagaaggctgagagacagtctgcttatggagaaagttggagtatttccccagtgccccaaccccctgccacttgtaccatcacagtcgaaagaagggaagagtctcctacttaacaaggtgagatagacgttaagaaactactacttggagaacttgctatctaccaccttagacttagaaaaggtcaacggattagtgtttgacacattcttgaaaaattataaagtaaaaactcgtggctgaatttctttacctaatcaagtttcagctgcactgtcactgacaacaggacagaggtgactgtttcccttggaccatatgtaggaaacatgtgggaggagtgtcatgtgggatcatttgaaaggcaacttcctccagaagggatttttgacagcataagtggatttcaacataaagagaccaggtagactatcacatgcagacaccatgagtgtgtcatacgtcaccaggcagaagatgtgtgttacctacatagaaagaacaacaatctgatgttcttatttggataataggagtctcataaaatctcataaaattgcccaccagatggagtcatttcaaaaattcaccatgcctggaaagtactaataccattttaaaattaatacacagtcaaataagacttctcctaatccttaccactcctctcctgatcctgttcttctcttgacattccaaatgttgaaggtttaaaaactgagtgtagcaagtggtgagaagaattggaactaggagagaaagagaaagtcaaactcacaaacctccttccagctatgggttttcaagcaggcctgatctaggggataagagaatgcttaagtttaaaatttgggatttttcttattaaatagggcactgtttaactactgaaatgaagctattctcctgactaaacataactgaaaaaccattcattaaatgaaatgaccggaaaagttattggttcttctttgaatttcgccacaggaagaggaagaatcaaaccaacaaagggtgtttacagggtcatgggtgagaaaaagaatgaagttgcttttggcttacaccctagaaagtcatctcttaaataaaacacttacatttggactagtgattccccaagtgaaaccatttcaggatgtgccattgtccaaggtataactatgggggtggggtgactgaggtggagaactgaaaatcgttggaaatgagataaaaaatctgtgaggccaggatatttgaagggctattcatgaacatagtgtagtcattcagtcactgacaagatttggactaaggaagatgattaagtgctgagtgcaaatgttatcttaaatgacagtgggtgaccaggagatcaaaatataatggtcaaaggaatggggagagaaagagatatccaagttacatgatccttaaaaaaaatggatttattttttgtgtgagtggaggattaatgttctggaatagacagtgggagcaaagaggacactgacttatctctcaatgctgaggtatatggtgttgaaaacattccacttcaggagtaatatcccctgggaaccatccattaaggtgtgtagatggggaaacccttcttaaagaagtttagggacttattgagtatgtaccaccagtatcaacagaaaaataatgaaaagctttgggagtagtggtgagaaggaaagacatgggggaagagttgggtaagagacaagaaagaaggatgaagaaatgaatgaaattgggtttttaaaatatttcagtggcttcagcttaaatacttttattgctacatctctattgatggaaagataaatgctatattagtcagctcatatcaccataacaaaacaccacagactaagtggcttaaacaataaaaatttatttcttgcagttctgaagattggatcagggtctggcagggtcagtgtctggtgagggctctctcctggcattgcagacagatgccttcttgtggctttttccatagcagagagagagagagagagagagagaggaatcaagctctctcatgtgtcctcttataatgacataatcctatcagaccagggccacatcctcaaaggaaggtacagtatcttccaaatgccccattgccaaatacaatcacatcaggagttagggtttcaacatatgaattggtgcgggtggtgggacacaaatattcagtccataacaaatatagagcagttctcatggtagttttttgttgttgttgaacagaactcaggcatgagaaccaaatatcgaacaaagaagggccacgtgacacgtaaacttacgtgtttgtgcattgcctactcttctaccattggtggactgacaacaatcactggtacctccaccaacttgatctttgcagagtatttcaatacgtaagtaaccttattggattggtgatttaacataagggcagcacaaaaattataaaaattattcttacctgattcagagaattcaagtacagagatgttatgttaactctcccttgtttcccttcaggacatctatagatctacagaccttcctttatactgagaattaaatattcagggaatactgaattaacttgtgccaacagatttcccaggtcagctcagaggggataactcttggctgaccacccttaacaaacaggaaaaacatttttcattgaaaataataccacaaatggtagttaactaaagtgaaaaggaattattttcttgggacaatttatgtagggtttggggaccaacatgtgaacttaagtaatgaatggtgaacagaggtattaattttggaaggcttggctttggaattcaaaaaagatttgaaagattgaacaattgtaataagtgtcagtaataaagtattctacaaacagatatatgactgttaatatgtttggaactgtgatgacaattccattgcagaaatgggaatctgtggattcaacaggtagaacacttgggttaaaaaatcctcaatttgcaggtacttacattgtgaattattttacttacttatttatttttctgagacagggtctcactctgctgcccaggctggaggacagtggtgcgatctcagctcactgcaacttttgccaagtgattgtcgtgcctcagcctcccgagtagctgggattacaggcatgcaccgtaatacccagctaatttttgtacttttagtagacacggggttttgccatgttggccaggctggtctcaaactcctgatctcaagtgatccacctgccttggcctcccaaagtgctaggattataggcatgagcccctgcacccggccacattatgaatttaacaacaaaaaggtccatgattctcccaagacttaattttttcatatgtaaaatagtcacagttgatagggttattgtgagaattcaatgaagtaaactatgtaaaaatattttgcgctatgtaagtatcattgaaacaatagtatgaaagtccatggtgtcatatgtgcactcagactggttctactaaaagaacagataataatcagaatttcaagaagacagacacaattgagaaagcctaggaacaggatttgggttcacagaaaaattagagtttagaggcaggaaaactactctctgtgaagtagattcatagactctatgaattttctgaaattatttgcaaaatgttgtgcatgcacggattctctaagaaatacaagactcaaagaatgtcaatctccattctagaaagaatgggtgtttgtgttcaacgaacactggtataggagtttaggatcaatattacacagacctccaagagtattgtttctatgaatacacatccattatctacactccaattactgacttagaaaactttaaaaggtttttggtttataaatgagaggcttctgaaactcacagtaccagtgaggatttatccaatgtatcccctaatttaagacaagaaatgcacctgacatctttttgaaaatgacttatatcctttctcatgaattctccaagagaagggattccacatcttagttcctgtctgtgaatttctttttctaatatccagaccgaattcttatgcttcatctttgttgatattagagaactgctggtttccatcattcacatgaaattagttgatacagtcaagtaattcatattactctgtaagattgcaatatggtaaatactatggaagaaattttgacacggcagagtttggacttagacctcaattcagatttcaagctcaccatatattagcttaacttctgtgactatcagtttccttttctgtaaaatggggatgatactagaacttacaacattattgaattaattaaatgccataatgcacatgtggctctagcagagggtctggcacatagtaacttgtcaataatgttagctgttgttattgccactgctctacttttgccatggctgttaaaaatctcagcctggatcatgaatgataaatagttaatattttgaggaaaatcctctggaagtacacacacacaaaatggaaaagtagctttatctcagagataatcaaaactgtcatcagtcaaaaggtctataattggtgtgcaattatagtatctatagtagcatactatgacacttaatgcccaaaatctgttccaaggttataaatttccaagactacattcattcttttgaagctatgttctgagtatttcatgggtattaaagttatttgttttgcagtggggcataagttgcatataacatgtaagttacttgcagtgacaatgactcttcctaagagtcaaccttgacgtgtaaatgtgctttaggtcaaagcacatctccgtgttatggggcatcatttctacaattgttttaaagtgccaagaaaacataaagtttgtactccagcctgcggatgttttgtaatatatgtggcattttctctttttacctgggagctaaaattgaggatgtaatggtttaatgaacagaggttgtgttttaaactcctcctgggttaaaaatccagtttgactacacaatctgactttgagaaatccacttagccccctaagactcagtttattcctgtgtaaaataaaaatttaatgcttttttcacaggatttttgataaaattaaaagtgcttagctcatctgctcatttctacctaacctctaaaacttacagtgccccaagagaagcacttcagtttctcttctaaatctccattactgcttaaatgatcagacccatttctatgtttgtaataccacctatgtgctgataactaccaattttttatctctatccctgccctttcctctgaatttcagacttacttatccagctgcattccaacatgaccacttcaaaaactgagggacatctcaaatcatcacatcccaaaacagcatgcttgatctgccacctctcccctgccctcctgccaatccaacctcccctcagacttcaccatttcaacatatgacatcttttctccatttcctaggttttattccaaatatatctaaaatatcttgccttctgtttatcttcacatgtaaactaaaatctactccactctaccctacttccgagggactttatcttgtaataggtttccctgtgtattcctcttctactgctaccttacaaatggcaatcaacttagtggcttaacacagcacacatttattatctcattatttttgtgggtcaacagttcaggaagaaaggggcagagcaagatggtggaatacagggctccatggatagtaccccgtgcaaggacaccaatttaacatctatctacatacagaaaagcaccttcataaggaccaaaaatcaggtgagcactcacagtagctccttttaatttcatatcattgaaagaggcactgaagaggtagagaaaacagtgtaaaatcacagatgctgcccctccctcattccctggcagtggcagcatgttgcagagagcattcttgtgctgtggggagaggaggagcccagcaattgtaagtcattgaaatcaatgctgtcctgtcatagcagaaagaaaaacaggaataaactcagcccacacaccaagggagcatttaaaccagctgtagccagagaagaagtgcccatcccagcagttggaacttgacttcccacaaccctcaccactgcgggctaaagtgttctggggccaaaaataactctgaaaggaagtctagggcacaaaaactacaactcctagacatcttctagtgctgaactgtgccttgagccagaggacttgtgtggggggaatgtagtctactgggacaaaagacagggcagctaagggagtcctcatatccctcttcactaactccaggttgcacagattgcagctccaaaaaaagactccttcctactgctcgaggagaggagacgagaggagagggaagagtggagaggactttgtcttgcatcttggataccagctcagccacagcaagttagggcactggccccctttccaggctctagctttaggacgacatttctagacacaccctgggccagaatgaaatctgttgttctgaagaaaaagaccaagcctgggaggttgcatcacctgctaactaaagagctcttcgtcagccgggtgcggtggctcacgactgtaatcccagcactttgggaggccgaggagggcagatcaagaggtcaggagctcaaaaccagcctggccaacatagtgaaaccccatctttacttaaaaatacaaaaattagccgggcatggtggcacatatctgtagtcccagctactcaggaggctgaggcaggagaatcgcttgaatttgggaggcagaggttgtggtgagccaagatcgcgctactgcactccagcctccatcaaaaaaaaaaaaaaaaagttcttgcccctgaaagcaagactcaggagttacatcaagagctttgggtgagactgtagagactctaagagttgctggcttcaggtgagaatcagtgcattcttagctgtggtggctgtgggttgagactcctgcttaacaaaagcagagggaaaactaaagaggactttggcttgcactttaggtgccagcttggccacagcggtgtagagcaccatgcaggttcttaaggtctctgattccttgacttggctcttggatggcatttatggacctgtcctgggaaggagggggagtcctctgccctgaaaggtgagtcccaggccaggcagtattcacacaagctgactgaagagccctcggaccttaagggaacatcagtggtagtttggcaatgctccccatggatctgtggtggcagtggacacggggtgagctttcactgcctttggaaaggggtgggagagtgggaaagactatgtcttgtggtttgagtgctagctgagccacagtacattagaacatcaagccttaccctatacatgaaaaataaaaagcaagaaactaaaccatatcactagagaaactcaccttcactaaaagcttccttttattgaaggaagtagagataaaaggaagaaaagaccacaaaacaaccagaaaataataacaaaatggcaagagtaagtccttacttatcaatagtaacattgaatgtaagtggactaaactctccaatccaaagacatagagtggttacatggataaaaaacaagatctattggacagttgcctacaagaaacacacttacccaacaaagacataagttgactgaaaataaagagatagaaaaatatattccatgccaatggaaaccaaaaaggagcaggagtcactatactcatatcaggcaaaatagatttcatgacaaaaagtataagaagagacaaagaaggtcactatataatgataaagaagtcaatccagcaagaggatataacagttgtaaatatatatgcaaccaacatgggagctcccaggtatataaagcagatactattagagctagagagagagggagagagagagagaaagagacctcaatacaataatagctaaagacttcaacaccccaccttcagcattagatggaccttccaaacagaaaatcaacaaagaaacattggacttaatctgtactacaggccaaatggatctaatagatatttacagaacatttcatcaaatggctgcagtatacacattcttttcctcagcacatggaccattctcaaggatagaccatatgttaggtcacaaaaggagtcttaaaacattcaaaaaattgaaataatatcaaacatcttctctaaccacaatagaataaagctaataatcaaatacaagaggaattttggaaactataaaagcatatgaaaattaaacaatatgctcctgaatgaccactgggtcaataaagaaattcagaaggaaattgaaaaattttttgaaacagatgttaatggaaacacaacatatcaaaatctatggaatacagcaaaaaacagtaccaagagggaagtttatagctctaagtgcctacatcagaaaaaaaaagaaaaacttcaaataacctaacgatgcatcttaaagaatgagaaaagcaagagcaaaccaaacccaaagttagtagaagaaaatatcagagtagaattaagttaaattgaaataaagaaaacaataccaaaaaaatcaatgaaaacttttctttttttaaaaagttaaacaaaattggcaaatctttagccagactaagaaagcaagagaaaagatccaaatatttaaaatcagagatgaaaaaggagtaattatagctgatactgcagaaattcaaaggatcattagtagtgactatgagcagctatatgccaataaattagaaaacctagaagaaatggacaaattcctagccatgtacaatctaccaagattgaaccatgaggaaatccaaaacctgaacaaactaataacaagtaatgagattgaagccataataaaattcttccagtaaagaaaagcctgggacccaatggcttcactgctgaatccttccaaatatttaaaggagaaataatatcaatcctactcaaactattccaaaaatataggagggaatactttcaaacgctatgagtccagtattaccttggtaccaaaaccagacaaagacacataaacaaaggaaactacagagaaatatcccttatgaatattgatgcaaaaatcctcaacaaaatactaacaaactgaattcaacaaatacatgaaaaagatcattcatcatgaccaaatggcatttatccctgggttgcaaagatgtgtcaacatatgcaaataaatgaatgtaataatacatcataacaacaaaaggaaggaccaaaactatatgatcattttaatttatgctgaaaaagcatttcataaaattcaacatcccttcacaataaaaccctcaaaaaatttgtaaagaaggaaaataccttaacaattttttttaaaaaaagaagctgtatacgacagataacagacccacagctagtattatactgaatgggtaaaaaaaccgaaagatttttctctaagatctgcagcatgaaaatgatgcccactttcaacactgttattcaacatagtactggaagttctagctagagcaatcagacaagagaaagttaaaaaggcacccaaattggaaaggaaaaagtcaaagtatccttgtttgctgatgatatgatctgatatttggaaaaaatgaaagactccaccaaaaaactgttagaactgataaacaaattcagtaaagttgcaggatataaaatcaacaaacaaaaatcagtagcatttgtatataccaacagtgaataatcagaaaaagaaatcaaaaaagtaattccatttatgacagccacaaataaaactaagtacctaagaattaacttaatgaaagaagtgatagatctctgtaatataaactataaaacatggatgaaagaaattgaataggacaccaaaaatggaaagatatttcatgttcatggataagaatcaatattattaaaaggttcatactactcaaagcaatctacagattcaaggcaatccctgtgacaatgccaatgacattcttcacagaaatagaaaaaaaaaatcctaaaatttatatggaacaacaaaagaaccagaatagccaaagctatctttagcaaaaagatcaaaactgtaagaatcacattacatgacttctaattacactgcagagctatagtaatcaagacagcatggtactggtatataaacagacacatagaccaatggaacagaatagagaacccagaagcaaatccatacacctacagtgaactcattttcgacaaaggagtcaagaatatacactggggaaaggcagtcttttccataaatggtgctgggaactctggatatccatatgtagaagaataaaactaggcccttatttcttgccataaacaaaaatgaaatcaaaataaattaaacacttaagctaagacctcaaactatgaaactactacaagaaaacatcggttaaactctctactacataggtctgggcaaaaatttcttgaataataccccacaagcccaggcaaccaaagcaaaaatggacaaatagcatcacatcaagttaataagcttctgcacagcaaaggaaacaatcaacaacatgaatagataaatccacggaatgagagaaaatatttgcaagttttccatctaacgaagtattaataaccaaaatatataaggagcttaaacaactctatatggaaaaatctaataatacaattaaaaatgggcaaaatatttggatatttctcaaaataagacatacaaatggcaaacaggcatatgaaaaagcatgcaacatcactgatcatcagagaaatgtaaatcaaaactacaaagagatatcatctcaccccaggtaaaatggcttttatccaaaagacaggcaataacaaatgctggcagggatgtagagaaaaggaaaccctcatacactgttggtaggaatgtaaattattagtacaaccactatagagaacagtttggaagttcctcaaaaactaaaataaagctaccatgtgattcagcaatcccactgcagggtatatacccaaaagaaagaaaatcagtatttggaaggtatatctgcactcccatgtttgttgcaatgctgtgtatattaataatagccatgatttggatgcaacctaagtgcctatcaacggatggatgaagaaaatgtggtacacatacacaatggaatactgtttagccataaaaaagaatgagatcctgtcatttgcaacaacataaatggaagtggaagtcagtatgttaagtgaaataaaccaggtccagaaagacattacatgttctcactgatttgtgggatctaaaattaaaacaaatgaactaatggtgatagacagtagaagaatggtgaccaaagactgggaaggataatagggtgtgggctgaaaggtggggatggttaatgggtacaaaattggcagaaagaatgaataagacctagtatttgataggacaacagggtgactatagttaataataatttaattgtacatttaaaaataactaaaagagtataattggattgtttgtaacataaaggataaatgcttgagaggatggataaccccatttctatgatctgattattacacattgaatgcctgtatcaaaacatctcatgtaccccatacatatatacaccaactatgtacccacaaaaattaaaaattttaagaattttttttaaaaagactccaggcaaaggttagctgggttcctgctcaggatcttaccaggctgacagcagggtggcaactgggcctgtaacctagacaggggctcagggtattcctccaagctcattgatgttgtcagtagaatttggttccttgcagtttaattactgaggtgtccattttcttgctggctgttggcatggggtcactctcagcttctaaaggctgccttcaggcccttgctacagggccccttcctctgacaacaggatgtttgcttcttcaggccagcaggaaactctcttttaagggctcacctgattaagttaggcctacccgggatagttcgtgcttttgattaactcagtttcaattgctagggactttgattacctaagtaaaatcccttcacttttttcactacgcaacctaatcacaggagtgatatctcatcatattcacagattccatccacacagaagaggagatcgtacaaggcatgtacaccaggaggcagaaatttgaggcatatcttggaactctgtctaccacatcctgaacatcacacagtttccactcttgttgccttcaatcctgagaatgcatccaggagccattctgttttatgtcaattactaattagatcatgtcacgttactaacttactacgttccaattagtccttattgcatttgtaataaaatccgcatactttcggactggctacaaggttatacatgatctgatccatattgactacttctttcatgtcacactcaccttcactcattacccacagccacagtggcctcctatctctccacaaatgtgacaaactcattcctaactcaaggactttgtaattgctatttcctccgtctggaatgctgtttcccagttattcacatgactggctccttcttgctatttaggtctcatctaaaatgttaccttctctgatggcattacgtaaaatttcccccttccccaatcactttttattacattattctgctttatttcctattttgttatatgtttacctgtttattgcctgtgtgccccactttaacataaagttcatgaaagcccagaccaggtcaatctcattcaccactatgtccccagtagcttggagagcacctggcacttggtagataccaaacagtgttaggtaaaagaaaaggatttcatcagaattaagtgtcttagcatagttcatgacagaagaaatctgtatttgctttagatgcatgtttgaagtctcttcacttgcaggacatgagaaagagtgggaaaaggaacatcacagcaaaagaaaatgcttagagtatgccatatatttctttatttgtccaaaatattcactctaggtataagggtaaaggttatgattatagaggcatagtcccatgtggttgtttatatacttccatactattaaactaaacaaaacataacaatgaagtttaactttttcaggctttcatttttctaaaactattcctccaggcaaaaattctgaaaagcccatcttcagtcaaatacattttgcaggattctctccagtgggtagagagagctctgcatactgatttcaagatatgagccacagatggtgaaaagtgaaattaggcttgaggacatgggtctaaacctaatccaagcagcatttctgagtgtcgttaggttgtacagaataacataggtcatcctgtaatccaagtctaatgttaatgggaaatcagcttttctcccattactttattttccaattggagacaacaaacatttttcaaaaatgaacagttttcaatagagcctcatggatgtgataaagtatttttccattcatcacactgcacattttctaacatctttaattatcatttgtcactttctaattgcataaatatgtaagctaatctttggatctcttcaaggtagataaaaattatcctccagttgctaaagataattctagggcctagggagattaatagcttttcataagctcaaagaaaatgatagaaaaccttagaaatctagagttttgagggcccattattattaggaaccatcttaaagtagaaaaagaaacactctaaagtgtataaatttgctacatagatataacatgaaatattttattacttatgtgatttttaaatgacaaagtacaaagtatgattaaaatagaaaaaattgcaaatcaatatttctataaagttctacatattttatgacttcaaacatattaaaatatgttaatgatgtttttattacttctgtatatctttgtttttcagattttcaaatttatctttatgttattgcttttagaaaaaaagtaaagacaactgtttctcaaatttcctattgtttctccatagtaataaaataaatgactatataagaatttatttagtattagacattttagaacaatgaatgtgaggttaccaaagaaactgtgctagtgtctgatcttatgttgttgttgttgttgagttattatgtgagtttaaaagttgaaaataagtaggtaagataaaaaagaaaagttgttgatttcttcagaacttttaattatttttatctggctcagagttactccatttgactgtgccccaaagcaccacctggttctaggaagaaagagctaccatatacctggttcgatggttgctgtgctttggggtagaagaaacagaaaggaaaacagccatgggagatgacctaggctggatcagagtactttcacatggccaagaattccagccaccaaggtgaaatgggaacagacattcagtcccactaattttcacctgttcccatttctgcttatgtgtctttccttgttcatatactgatggagtattgacaacaaaacgcaaatacctcatgaacacccatttcttgtgcatttaatactcattaaagccaagaactgcactgggttttttccacaagcacttccttaaagatgaaatatagagaacaaaaatcaaaacacatccactcttgcttatatgggatgcagtgataattatgcagttccagaatcaagacaggagacaaggggtaaaagtactctatttaatgatgagtatattccaggacttccttcttggacagaaacacaggaaagaggtggactgctgcttccctgtgacaatcagaaaggattccacctgtctctccatccctgaacacgtctccatgttttcacacagacgctatcctgactgtcgttgcctcaactttggatcatggtttacgttttccttcccagctgcccttatcattctactcttatcctggatctggcttcagtggcttttcctaggattcaagtaagtaaatatttcatgttaataggctaaataaaggtgtctaggttcccagttcttagcttcttatccgatgctctttcccctatgccatgcaggctacctttctgcatttttgttgctcacaaaattaatacacacaaatacgtattttaaggataaggttgaatctcatttaaataatactggctgtggaacagttaattaaagattagaaaggggccagctgcggtggctcatgcctataatcccagcactttgaaaggccaaggtgggaggattgcttgcgcaatcctctctgagttcaagagcagcctggacaatatggcaaaactctgtctctaccaaaaacaaacaaaaaaccaatcaacaaacaaaacaacaaaaaaaacctcccccctaaaaggaccatccaggcatggtggtgtgcgcctctggtcccagctactcaagaggctgaggtggaaggattgcttgagcttgcggggtggaggtggcagtgagctgagatcacaccactgcactacagcctgggcgacagagaacggtctcaaaaaataaaatgaataaaaataaagattagggccaggcacagtggctcacacctgtaatcccagcactttgggagatcaaggcagttggatcacgtggtcaggatatcgacacaatcctggtcaacatggtgaaatcccatctctactaaaaaaaacacaaaaaatagccaggtgtggcgggtagtcccagctactcaggaggccgaggaaggagaattgcttgaacccgggaggcggaggttgcagtgagccaagatctcgccattgcactccagcctggatgacagagcgagactcttgtctcaaataaataaataaataaataaaaataaagattagaaaacaaataatctaagtgtcctttgagtcctaagatgataagatattgaagggcataaataactcaatctgatgtccaacttgttaaaggggaattttaaggtttgcccctccacttggtttaatgtggagatttccttgggttatcaagctacttacactgtgacctatagggcttcctgcatcatgctagcaccaaaattgacatccctttcaatataccaagtacaataaagatctgaggatgttctctgtggaaagaatattgttttaggaattagtagaccaggaataaaattctggcttctcagaggccagataagagatcattgcaagtccagacccattctcagtctcagtgtcttcaattgtaagatgatagaatttacccagaaaatcagtaagatcccttccaaggctataattctaacacatctgggcctaagttgaacacatagaagtcaaagtaaaaaaaaaaatgttgaccaataaagaccgactgatgccactaaaatgtcaaatacatgcattcaaagacaacttcaacatattatcttggctgggatcaaagctggtaggtcataagtaccaatgagttacataacttagatgacaaccagcatttaaaattatgaagggctccagagcaaaatctaaaatgcagcctgtaaattctactcatttaacaatactccttaaagaaaggtgaagtcgctgtatatcaaatcttgagtattttttttcctgaaaaacaaaacagctcaaatttatttttgtggggttttatttaaataatttcaaggacctatgaataaaacagcatgttattcaccaaaccagagagactgaagccagctatgtgtacttcctttgaaaagtgaaatgctttgggaggccaggggagtggatctcctgaggtcagcagttagagaccagcctggccaacattgtgaaaccccttctctactaaaaatacaaaaattagctgggcgtggtggcaggtgcctgtaatcccagctactcaggaggctgaggcaggagaatcacttgaacctgggaggcggaggttgcagtgagccgagatcgcaccattgcactccaacctgtgtgacaagagcaaaagtctgtctcaaaagaaaagaaaagaaaagaaaaatgctgaaatcagtagtggttccatgcctgtggccatgggttccatgcctagtaatacgaggactgacattctcccctcttgattcctctttctgctttttctccagaactgccatggttttattagtagtgagaagatggtactgatgattaaaaagataattctatccagattgtgggagcagcatgtggcagtcctcctgctgaagcaaatgtgtaaaatgtcactgatttcagcaggtgggcatcaatggggagaggccagctgcatactaagtgcccctttcaggaaatccaagcctttggggactattcaatcatgcaggtagcaatgcaggatacaggagatggcaatcccaagtcaaaagagtcacaggttcttcattgctacatttaatgactttatcaaacatatatgcaaccattgtcattattttaaaatggcacaccatttaaaaaggagaaattaagaagataaaaggcaaatatattgaaatgtgctcttaatgaggaaaaaaatcccatgaagtgcatacactaggcaaagtctgtaaatcatgatgagtggtatgtttaaacagttcccttggtgtccactatctgttaaacactgcacagattcatgctccagctaatttttcagtgtccttttctgtctgccaaggtgtttacctccagagattttagattgacagacggaaattatcagccgctcccctggcaaactagcatacattctgattagtatgttgggtattaacacagttaactcacccattataaatgatcccaacatacctgagaagaggagctcatctgtcagtgccattcaattatttaaatggagagtttgatgcattgtcataggctttgtcagtagctttgtgaaggcattaaccttcatttgtagcaatgccaatttggctttcgacttaactatttattgtctgcaaccaaaatgataaactatatatgcaatgtactgggtggaaaattgtttctaaggagactcatctccttctttactatgattttctcttctacagattgctctctaggtggcacattaattagtttcttataatagtatttatgtcatgacaaggggtaaaagtttgagactggcactagtcagtaatttaactgagattgtaaaaagcaattatttcctaattgatcataaatgtagcactgtccattcactcatattcaggcattgaagtgtatgcatgaaggtgattatgaatgtataggcttgccccagatactttacgaaagaaaatgtcctttctgtctatacttacacaaaatgtaaactaactgagctgctcataaacattccaagagataatccataagaatctagccattttttcatttagttcttcctctggaggaatttttttaaaagtctccatctagaacagtatttcacaaaaactgttcagtttcgaagacactggacttcaagacagaaaattagtgaggaaggaggtcactaaaacaagcagctgaaaacaataaaaagtggcagttactattggaaataaacaggaaaattatgttgtgggtgctattaggacatatgagtaaagaaacttaaagaaaaaaatgtaatagagttttacttcttttttaaattttatcttaagttccatgatacatgtgcaggatgtgcaggtttgttatgtaggcaaacgtgtgccatgatggtttgttgcacctatcaacccatcacctaggtattaagccccacatgcattacctgtttatcttgatgctctccctccctccacacccctgacaggccccagtgtgtgttgttcttctccctggttccatgtgttctccttgttcagctcccacttatgagtgagaacatgtggtgtttggttttctgttactgtgttagtttgctgaggataatgaattccagctccatccatgtccctgcaaaggacatgatcttgttccttgttttggctgcatagtattccatagtgtatatgtaccacattttatttatccagtctatcattgatgggaatttgggttgattccatgtctttgctattgtgaatagtgctgcagtgaacatatgtatgcatgtatcattaaaacagaatgatttatattcctttgggtatataccaagtaatgggattgctgggtcaaatggtatttatggtgagtttattttacttctaagactaggcttagtttagtctctgaccatgatcagtccctgcactagtgtaaaactcgagtttagcatactttgtgaaaattgatggatctgaccccaactgtctcatacatttgccaaaggtactattggattgatgtgtcaggtatttactgtgtatgttcagaggtagcagtgttcagagatagcaggccaaaggaaacatctatgaccacctcactgtccttgccctcaaataatttaactagtgggctaaaacttacatgcgtggaagaattaacaaccaagatacacaataaatacattttaaatatataagatccagtacgtaataaaatgttagttagagataagtggcacatggcaaaattccaatggtacaaaataacttggaaaaaggaagagattggtaaaggatgtcatggaaaatatgcaatgaaaattgaacacgaaaaagtgagcaaaccaggcaaaaacagaaaagacagaaaacattcaaaaaaggaggtggaggtagaggtgaaaagcacagatatctgttattaacggggagattcatattgcatgaagggagattcatattgcgtgaagatgacaacgttttacaaaaatatcttccttacagggaggtggtagtaaaagaatttcttgcttacaggcttaattattctttgcagttttaaggagatgttcaaatgtggcaaaaccaaaacagtccaacaaaaagcttgtgctgaggtgattaagcaagaataccaaaagcttgggccaataaggtaagacaaacacacacacacacacacacacacacacacacacacacacacacacacagagaagagagaaatgctgtttacactgcaagtagctgttgaaaagcaaacaagcacataattgcttgcaaggtatttataacacttgattagggccccaaatttgctaagctatggagattatagactataactcaacatgataaaacacataccctgtctaactaaaatttgccaggtaaaatgaaaagaagctgagagaccccaaagaggagaaagggctttttcaaactgcactgatgctctcaaattattgacacatctagttcttacagtgtttagtgttctactgcgatcattcctgacaatagctcaaggagtttctacaaatgtcccgactgagaaaataagaagtgatgccattggaatttttccacaggtatcaagaaattgtgaccttggtcctcttcattataatggctctgctatggtttagtcgagaccccggatttgttcctggttggtctgcacttttttcagagtaagctttgcacgttatgtttgtcagcccttcctgttttatactctgcttctctcctgtgtggttcctgtaattctgaaagattggatgagatatttttctttctttcccttgaaaagatattttaagttctaatcttttcaggaaaaaaattataaggaatgaaatctaggataagagcacagaaagaataaccatattacttactctgttactgaaaggcaaagtccattagacaaaattattcccatccctacaaaattcccatccctacaaaattattcccatccctgaaatataacagcacaaaggctatgttctgtggtggttgggagcatagatttcagagccacactgcttgggttcctttcctgactcatccccttactttggacaagtcacttaattctcagggtcttcatctgtaagatggaggtaattatagcatttacaatagtgctggacttctccctattggaagtgctatactaatgttattatgtgaagtaaataccactcaatgcctcttaataatctggtataaattcatattatgtgatttttacccactttgttttttaattctatggaggactatttgtttggtgtagtatcttgtcttttttcttcatttatttacatttttgcactagttcactacaagttcagcccagcctccatttcatagataaggaatttctgaagaaataataggactgattttaaaagctggtgctagaagctaggtcagagttaattttatatctcagtgtcttatataccagtaatcaattgctgagttgtgtgaagtgagggggaagggtatagcataattttctaaattaaggaccatcctatatgtcaatataaataactcagttgtgagatttgtgttcccaatctatctttcactgaactactctaatttctaaattcagcacatgtcttacttggacttcctgtctcaaatcccccagcaaaaaaaaaaaaaaaaaaaaaaaaaaaattgtattttggggtagaaaccaaaattgtttaggtcatatgtattttgcccacatacaataaagaaattcttccctccctgaatcagaaccttctggttttataggcattgtcaatgtttctgaagggtgcgaagtctgagtccaaattcctaatgaccacacaagtcaatatggtggtgtgttttaaagcatcagcttcatttttataaactttttgattcccttagaaataaaacttttcattttgagaggtttagacattcagttatttaaatcaagttattatgtaatatttaattaatattttgtggttttgtggtaggatctagatcaacataaaaaataatgcttcccccttttaaaatccaacttctgtcatcctagacagggagagtctttatctaaacaccagtgcgtaagaattaaatgaaatcagagatagctaataaagcccaggcagaaatcccaataggtaattcaatataatcagcttccaatttctgtttcttatgcgaggaaacaggaattgttttgtttgtagcaggaaagcagtgtattggctatgagcaggcactcatgccacctacaattctgagagaaaacaataagaaaggaacaaaggtttgagagaggatgggattttaaaatataaatctaattggcaaacccaaaacaaataaaatttatataagcttaatagtttctaatactgagacaacctaactgcattcctgagaaactaaaaataagttataatatgataagaatagtttttaaagtactttgaaaagaaattatttcagtatttatgccttgatttaatttaatgtatatattttgtaggacatatttgttatgtagagtttcaggcattaagaatttctaaagctaacatgatgtatcaagatttatagctaccacctaatgttttcattccatctgtttgtacctggactgaattcaatgtgtctttttatataaaacgaaatctggttacatgatgcctggcccaatttgccaaaaatacaaccaaaaattataactgaaataaaagaaataaggtataataaaattataaatatcggtccagtttgtaagataaattatggtaaggtagatttttaactagtaatgaaagaaaatgtgtctatacttaaagaaagtagactgctttaaaaattgctagattgagaaagatacggcatttctttggctttttagatttttcaaataaattatagaagtagagaagcttcggtagtgtatacatattactgagttgcaagatagtaaaagaatctttagcatggtacatatttcttctcaggctacagaaatgcactagttaatattgctgacttttaacactaaatgctaattattaatgcctatttcagttatatctggtctccaggttctttcctgttgaggcttctgggaatctgtcttatttgttacaatggtctggtgattctaagaccccatctgttcctgaatcagtcttaatttatatggtgatcatttgtgagcattggctaaaccactccaacaattaatattcttgattgaatttcatggggtgcaaaaaattaagtaggttgctttcctttgtatgatatggttagagcttataaacacagaagcaggtgtgatatctcagaaaacagatcaattccttttcacaatttatagaagagctttagaggaacacagaaatatcacgccttgccacaatttaatagaaggatgttataaatcaattatatggggctttccatgctctagcaatgtttcaacttcaaatcttgatcaatattattaaattaaataattcaaagaagaaattgtttaacaaatctgtaagcttatctaaaagggaaatttgccactttggcctagtatgtcagcatgtgtatacgtggtattgaaaataagaagagatatatgggaacaataagactatggtctgagattattgtttttagtgttgtgtcatttaatcgggaatccatatattttagggcagattattgaggataaataacctacaccacctactactgataataacctattactgatatgttattagcaaaattggtgttttagctcatttaagttcttgatgctatttttaatacatgtatttgtcccttttacaggtaccctggttttgctacagattcaactgttgctttacttatagggctgctattctttcttatcccagctaagacactgactaaaactacacctacaggagaaattggttgagtatcatttataattctgcataaatttaacagaagagcaaaaattacaaaattccattggtttcgcttggcacctagagcagaaagaaagtctatgctggcacaatccctggcctagcatgccctatttgcaaactgcaatgctgtcttcaagccagcacagcttccaccttcaagagagatcgtcttactttgcagaagtgagaagtagatttccttttgtatcatggctagggctctgctacaagcgatactatttgacccatggtaaactcacttcaaaattaatcttactattggcaaacagaggaaaaagaacttggaagacactgcttcattatgataccttggtaataaatgcagaggatctaaaaaggtgatgaatttcaagagaaagagtatttacattctcaaagtagttctggaacaaaagctaaataaacctcacatagccatatcctaggatcacagctgaaataaaagggccagatgtggtggctcacacctgcaatcacagcactttgggagactgaggcaggaggatcacttgaggccagtagtttgaaacaagccttggcagcatggtgagaccccagctctatcaaaaaattaaaaaaattagccaggtgtggtggccaatctggaggccaacgcaggaggatcacttgagcccaggagttggaggctgtagtgagctatgattgtgccactgccctgggcaacagagggagactcggtctctaaaaataatgatagtaataaaaataaagaaaaggtattctgtgacagcattcattgtatttacaacacatgaacaaagaagtgtgcacatttgcctgagcataccatcctctcaacacacacacacacacacagacacacacactttttaaacacaagattcatccatatctttgctttacaacacagcatgttttgagtagtcagattcctatcttgtcaatgtgggacaactaatttgtaattgtctggaaattaactagtagacttgtggttttgtttgtttgttcttatggggatggaactgggatttatgtagttgtgttggcccacttgactcttgtcagaatctataaatgactaatgtatcagatttccaggacatatgtgaccagcacagcatagaaacaaatgtactttgtttttcacttgagattagaatatctcaatgtgtgttaaggaggtgatgcaatatggagcattgattcctatgggaccccaaggactctgatcattgcagtcaaagccctgaggtctggcagtggcaagtactgaggaatccatgtttggctttagcttccctggtttccacatctgaattccctcccttagaaagagccttgctcctacccacctttctctctcccctcattcttcaaaacctcttctccctgctaaagtcattcatacaaggcttaaaaatgacaaataatatataaatatgttaaattttaaataagaagtacttgtcagagatgtttacattttaacaagatatatgaccttaaagtaagaaacctggtgacataatttcagttatcagtgaggatgggtttggtttggatttgggggaagatgataggaaggaagcttattggtaaacttaaaatcttaccatgtagaaggctgcctgttatacacaagttaaatgggcagaatatgtctccaaatgaacttctttatcaacaaagcaatggagagatcagaagccaaatataaagagaaatctttatgataatccttttataagcactttaagaacctcataaataatactttatttaatctgaatcttgaattatttttaaactgaaatcttggtgaatctatcatgatcctccttatgacctaaaaactaataaaatgttcaaatattaatggataataattaaaatgctacaagatgctattggaaccaatggaatattatggacattttgcatagcaaagaatattatagtctaatgcactgtgctattcacagttggcaaagatgttagtggaatataaatgaatgagtgagtgaatgaatgagtaccattataagtgacaatgttataatttattgaaatatattctataatattacccaaaggatttttttaagttatggagttttctcttttttatagtagaatgttccacctagtccaggtggaaattactcaaactccagattaattcccctctttaaaaacaatataggaatattacaaacttcctgtaagatggctacttaggatgctgaagcaaatgtcatattgtaatattttaagcaatgtgtaactgtaggatttttgttttgcagttgcttttgattactctccactgattacttggaaagaattccagtcattcatgccctgggatatagccattcttgttggtggagggtttgccctggcagatggttgtgaggtaatactctgtgtgtaagatatttaacaattaaccagactgttcaaaagaagagcacagagacattcaatctttgggcatattcaatttcactctgtcattttaatgttgcaaattttgctagctatgcagtgaatataccacacaaatgagatgagttcagagttcaagaaatattacaggctgcaagcataaaacatagtttttatggtgctccagaatgtcaaaagaaataatacaaagaagattaaaatgtttaattcatgaaatagtattagaaggctagtaaggaaaaatgtatatgaaaatatgtaaagtgactcctagtgaaatatacttttcgtttgcttatgcctttaccttatttcattatgaatttgagtagctcttggacttcagtatatcatgatgctattgctgatttaaaaaaaaagagaatgagaaataatattagctttaaagataattagtaaatgtttattgaataaagtctggagaaaaattcacataaccctttctaacattatattatgtctaatcttagtaagaaataaaaacaccatgagatgttggttgactttatttgacctgtctgtccagttgatataaagcaacagtttggggaggccctcatcccttgcaattgccctggtctttgtagagttgttggaagaaaattatcttctcccaaatttccatgaaaattaattactcctagattaattaaaaccactcattctggttttcatagacttatttgaaatattcaaagcttatggctcttccatttccttactcagtcatcaaattgaacagaatggtgagagaactgtcatgttcagccctttggcttccaggaggttaaatttctatactactcaagacaaatcactgtctcttctcttcttgataacttattggaagatactcctttgcttctaactttattgacaatttttctgcacagagttatgtgtctggattggatcctagacactcaaagtgattttgaaagcatcagccagaccctagcatacaaaatctgaggaaacgaaaaggtgtggactcagcctgatgcacaaggttctctcagtagaagaatttgggaacccagagagggaggtctagtttgctataaaaatctcaatatacagagccaaatgtctacaggatacccagaataactctacctctaagtgcccagattgaagccatgagcttcaagagtatggctgtggacaaatatgcccctaaaaactggactgtaaaaaatttggaggcaattaattttcaacacttttctttcaaattgtagtctggcaagtgtccagaaccagatactctttctagttgggaacagaacagtgaaacagcaactactatggaattcacctcattgcaattacttttcttttaaatgcccctgggtttttgttttaacatgatttctctctcatgagcagatagacagtttcaaattcttatcagtgaatatctcctcttcaattttcatacattcttgaaattttctctcctaggttaaacatgcaggatttattttttatttcagatatccattaaaattgcaataacaacaaaaacatgtcaatccataaagacaaagactatatgacagggacaagaagaggcaagaaatgtttatcacatttagaaagtggaaagaggatatttgagaggaactgactttgtacaaatagaaaaatagtaaaatatgaaacatataggctggcaaaatgaagagccaacaagaaacatgctggttatccatagcatactggcagacctcaggaactggaggcagcagataactctgaaagcaacagtaaaagccagagctgaatatggaggatggtttaaaaagtgtataaagatctatgggcttcccagatgctttccccagtcctgctgttgttctctgtcctccgtgatagaaaattgagatttactttgtagcaaaattgagccaatgagacactggctcacaaagagataagaacattagaacatcaatccaaaatgttcaacagtcaactaacaggcatttcagaaaaaaagagaaaaaaatagaaaagaagaacatttccacaaaataacacaagaaatttcttagagctagagactttgagattctggactgagagagctactgagtacccaataccaaagcactttatgtagaattttggaactgtggggatgaagatatgatttcagtggcctacaggtaggggaaacagtatgtagtataatcatttccacatctaattagacatagataaaacctattcttaaagtatacctattctaggattaatttgtgtcaatgtgactaaaatggtggataatctttttctacctaaaagtcataagcaaaaacaagcagataaacaaaaatacaagccaaaaccacacatgatatctggtgctcacatctaggaatttctgtgccagcttttgatctgagggtatactgcttgtaattagagtatttctcatgccacttctagttgtcataaagattcatacatgcaatagctcactgaaatttcacaaaaggaggattttcccttccatgtgggggagaaacacagaacaacatccttgctaatctgagtatagccagtttttctgcactatgtataatgaatcaaaggagcagaatatgaccaggcttctaaagaatccaactggaaaccacaggaaatggagtaatggcttagaagtgtggagttataattattttgaacctagaattctacaaatgcaaaacaataagaacagtgggaacagaaaagaaaaaggttttcaagcatgcaaagactcttataccaattctcaggaagttatagaaggaagtgctcccccaatgcaaaagagtagattaaaaaatgattcccacaaagtggggaggagaaggaacgtcataatattatagtgaaaaggggtcccagaacaacaacagttgaatagatttaaagggaaactaagccaaatggagcaggaggaggaaatattccagaatagatatttctgtgagggaacatgaaaagacatcaattacctgatatgttcatctatttgtggggagttttttagttttaatttcagatgaattagtgataggtacttggaaagctaagcaaacaaaataatgagatagttattccttgtggggaagggagagtaaacgcactgatagtatgctaagtggtgtagctatgaacaatatttatttaatcataggggtaaacattaaatattgatttaaacaaaaatgttaatatatgaatgtgggggaatgaagaaacaaaaaatatatgtttggtagatggtgtaagagagctgaattatcatgtaacatattagaaagtcagtaaataatgtctaaattttaaaagtaagcaaaaatcataattaaaatattattttaaaaggtaactatgaatacctaaatatagctagctataagtggctaataagggttgaaagttgttgcctctgcagaatataacttaggaatagagagaggtgaatcagaagggttgctcttctcttaaagccctctatatgatctattaaaatatccacatatataaattagataaaattaaaatgtaattgaaaaaagtggtaatacatttcaaactttctaaaccatgttcccagtgtcaaaataagactaagcaatagctccttcctaccaaagccacccagacctaccaaaccacagaaaaaaagagagattaaaattatattttagaaagtgagttttcaaaggaaataatgtttttttatggattttattgtgtctgattacaaagaattattcatgagtaacaaatattgcaaatttgttttttaggagtctggattatctaagtggataggaaataaattatctcctctgggttcattaccagcatggctaataattctgatatcttctttgatggtgacatctttaactgaggtagccagcaatccagctaccattacactctttctcccaatattatctccattggtgagtatctcatttatcccctttttactcttcattaagagcagtactctgcttcggaatgctggttttcatgttgtggtatggaatctcttttggtctaaatgggcctcctgtaagtaacttacagggtggtctttatttgtattaatgctttcaggggaccttcactctaggtaactgtttttaagttttcatgttcaagcagcatgatcttaagtgaacaacttactttttctcagtccagcttttttcgttataaataagagagagggtcagactagatccatttcagatgtaagacttggaattcagtgtttgctggtaactttattatttagatctctaccgctgacacttttgcctctcaaacattgttcctaaatttctgagaagtggttcatataagtgatttgcaaatgaatgaaaaactaggctcacacttcaggcttgaggcttaaatatcttagacagttttctactgcccagggaagaatttttaaaaagtaagtgggtttgctaaaagagagagggaaagaatgtcttttcttcttttctcaatctaggtagcaattacaagaaacagctttaagtaaaatgtttttcttattgggatggactggtttggtgaaaggaaagcactttaagaaggattgtctttctggaattatgctgctacaagctcaaagggcatatgttggtgttcataagctgctgattgaaagtagaaaaaatgtaggctgtgtatattggtacaatatcattttgtgttgttttctgcttttttaaaatttctcaacatggaacagttagaaaattatgtgttgatttaaaaatagtagtaactcttcttatatgatgaaccctaagcaaatcttaaattgcatatatcacagaggcagtaaagttattagtgtaatgagaactgctggagccacagggacttgaaaacctacctgagctctgttgctcaccagctgtatgctcggacaagttactttagcctctctgggcctctgtttctttatgttatttgaggttatagtagccatctcataagatcattgtaaaaattcaatatatatataaatatgtgacatttattatatattataaactatattatgtgtaaatatatgaatatatacgtatatgtaaacatttagcccaacacctagcaatagataagtaataaatggttgctgtttttgtttagtttctggaataaataatattttattttctaaatgaactggactgtaatgtttaagtgggcatctgtaactgtatcaacaacaagaggatgagatattttcttaaaaatattcaagttataactgcaataatttatataattttatatcattaggttccaacatgcttctgggaaggcttattgtaatactttttttttttttatgtttcgtgtctaccctcaaaattttacttagactcttttttatctcttacaacaggccgaagccattcatgtgaaccctctttatattctgataccttctactctgtgtacttcatttgcattcctcctaccagtagcaaatccacccaatgctattgtcttttcatatggtcatctgaaagtcattgacatggtgagttagctgaaaaaaatactatcaaatccaatacacatcttggtgtgtgccatgtcttgaattatcttcccttttatacaccaatcaaccaccaggaaaagcagggcctgaattctgtttatgaatgcagtgtgcatgactaatcacaaaattgtttttaagagtgattatcagaagtgaacatgccattaaaacttacggtcacaaacagagagatgttgaatgcatcattaatgctttggacgaaggaaaagagcactgaacatgctccacacgacagcataaacctacaagtcaacactaggatccaaactgatccaggcaaaaggaaaaaatagggttaaagaaatcagcaatcaaaacaacactgtgattttctatcacaaacatttatgcaccaacatttcctctgaatgagacactgagtcagtgcctcactgatgaagaagtatctttcttgttgtgatttcaataccaggacctaacgtgaaaacacaagcaaacaataagtaagaatttcactgataaagcatgcacatttttgccaaatacaaaagtactggcagaatattcagtactttataagaactggcttgagaatattctagtagtttccaaatcttcatcaccaatttccaaaccaacccaaatgataatatagccaaagtaaatttagtgagcttcctatgcaaatacagttccaagataagtcccagctccctttctttcacacagactgctgttcctaagctcctgcaacataaacattctagaactgcctctacacaaaaataatatgcatttggtaaggaaaacgtgcataatagaatataagtaatgcctgatgtatgtgtattaaaaaggataaaaacaggattctgggataaataagtggctggcttgcatggacaggaaagagggcatctgttatcacccttgctaggtattcctcttttgcttcagggctccatgttttaatgcagagaatgcaggagtaagcaaactttctctgtaaaaaggcaaatgatatttgaggccctgtggggccatatgttctctgtcacaactactcaactctgccattgtatcatgaaagcaaagaaaatatgtaaacaaataagcgtagttgtggtccaataaaactttatttaccaaaacaaatcaagggcagtaatttgccaatttttattttaatagatacaaagcaactctgagattgtttaatggactgtagaataatgatataagagctaaaaccatgagaatgctaagaaagataatagacatggcataaaatctcaataagaaaatatcgaaggttaaattaacaattacgttgagtgaatataaaagatacagttgccatatggcgtcctgaattttattcattgaaatataaaaccacaaaactgaaattctgctttaacatgaaatggcagatttctaagggattttcctctaatcagaattacttaggtatattcctaagaggaacttctctgagaatctccaactcaacgatgtttagttggagacagatttttctcttgctacgaatggagaagaacccctggatttaagaaatgacgagttaatgggtgcagcacaccaacatgacccatgtatacatatgtaacaaacctgcacgttgtgcacatgtaccctagaacttaaagtataatttaaaaaatgacaatttatactaatcatttaggatgcatgtaaatttggcatatacatcctacaataggattctaatctcctgtaggctttcttctgggacactgacatttatgctctttcctgttcaaggttaaagctggacttggtgtcaacattgttggtgttgctgtggttatgcttggcatatgtacttggattgtacccatgtttgacctctacacttacccttcgtgggctcctgctatgagtaatgagaccatgccataataagcacaaaatttctgactatcttgcggtaatttctggaagacattaatgattgactgtaaaatgtggctctaaataactaatgacacacatttaaatcagttatggtgtagctgctgcaattcctgtgaatacccgaaacctgctgttataactcagagtccatatttgttattgcagtgcaactaaagagcatctatgtgccttcatcaagaagcccatgttttgagattttgctcatgaaccatctgcaacttgcttcatcataagaataatttataacttgaccttcaaagagattagagcatttgtttcatcttacagttggagttcaatgtaacattttaaatgcaatttattatttcagaaatttcccatgaaactaaaaatagaaaataagatatacaagttaattcggtacttggataaatcatttctgcattgttgttccagagaatttgctgagaaatcaaagccatggtcatctggtgatgaagagaaaagtttaatctaaatgatatgtgcatttcctcatttaaaaaatccaattggattattcttaatatatacatgtaatatgaaaattgagattgaagcactaattccaaaattatggctgaatatactaaataacagaaaagttacagataagaatttatttctactgaactctatagttagtgtaatataattcatatttttatgatattggcacactgagaaattcattttgtagagctatggataaggcttgctatgatttgcactattagtacagtatagttagaaaggaaagctgaacactataaaactattaacatattttcgtatatgagtaacaactttgcttaagtgtttatcttagttcagaaatacataatgtcatatgttaaaaataaagagatgtagaaatctaaatgaattatcactgtgtatacagacagaaaaatcacataactctggtgtgttaacattgcaatgaaaaaatgaaaaaaagaaggaaaaaagaataagaatgaaaactgctgacgtattacaaaacagaaaaataaatgatttaaaatcaaatcaaaaagaaaaaactaaacatttaaacaaaaatgggataagaatagtcttctagaagtgaggatgcgaaaaagaatgagtttccaattaccctgatgtgacaattacacattgtagacaggtagcaaaatatcacatacacccccaaaatatgtacaaatattatatatcaataaataaatttttaaagagtaagtgctattggcattccaaaattcagctaaaggaaaaatgatcaaaaacaaagtaaggtgcacagttagcaaaagatgcagatgttatatcacagcaattctcatgctaaaaatacaacaaaagacaaagcaaaaaataaacctttgcttttttttttttttttttttttttgagacggagtctcgctctgtcgcccaggctggagtgcagtggcgggatctcggctcactgcaagctccgcctcccaggttcacgccattctcctgcctcagccaaacctttgctatttttaatcttcgttggcactttccagctgttactgaccttgtcattttttattcaaataagattatttacaaacttattcttgaaactaaatatagtaaagagggtttttaaaataatatttaacatacgaattattaattggccatgttcattatttatctatgtttattaatgggccaatgcaaaaaatcattttttcaaagaaaaatttgtccatgtaaagcttaaattataatattgctgctttgtataactcttctatgtttattctattcatttgttcctttccctaccatattttacacatgtatttataatctgtagtatttattacatttctgcttttttctagtcattcaatttatcactgctgaattgcatcagatcatggatgcatttttattatgaaaaaataaaatgacttttcaaattataatgagtaagttttggtctcaataaaataatgcaaacatttca

SEQ ID NO: 432 - DNA, 964 bp, Homo sapiens
  source 1..964: mol_type = genomic DNA; note = NC_000014.9:20891385-20892348 RNASE3 [organism=Homo sapiens] [GeneID=6037] [chromosome=14]
agctgcccctgaaccccagaacaaccagctggatcagttctcacaggagccacagctcagagactgggtaagtcaacaatccccagagctgggacaggaggggcagcgacagggcagcacctgagggagaggtgagctgaagttagtgcttaggagatgtggcacactttggggacaggaagaaaaggaaatgcgaccccagagtggcagcagaggggcctgtgggttgagacactatagagtgtgtcataaccgagaccggatcggggagtagttacttctcttcttttcttacaggaaacatggttccaaaactgttcacttcccaaatttgtctgcttcttctgttggggcttatgggtgtggagggctcactccatgccagacccccacagtttacgagggctcagtggtttgccatccagcacatcagtctgaacccccctcgatgcaccattgcaatgcgggcaattaacaattatcgatggcgttgcaaaaaccaaaatacttttcttcgtacaacttttgctaatgtagttaatgtttgtggtaaccaaagtatacgctgccctcataacagaactctcaacaattgtcatcggagtagattccgggtgcctttactccactgtgacctcataaatccaggtgcacagaatatttcaaactgcacgtatgcagacagaccaggaaggaggttctatgtagttgcatgtgacaacagagatccacgggattctccacggtatcctgtggttccagttcacctggataccaccatctaagctcctgtatcagcagtcctcatcatcactcatctgccaagctcctcaatcatagccaagatcccatccctccatgtactctgggtatcagcaactgtcctcatcagtctccataccccttcagctttcctgagctgaagtcccttgtgaaccctgcaataaactgctttgcaaattca

SEQ ID NO: 433 - DNA, 6105 bp, Homo sapiens
  source 1..6105: mol_type = genomic DNA; note = NC_000005.10:c58460086-58453982 PLK2 [organism=Homo sapiens] [GeneID=10769] [chromosome=5]
gcacaagtggaccggggtgttgggtgctagtcggcaccagaggcaagggtgcgaggaccacggccggctcggacgtgtgaccgcgcctagggggtggcagcgggcagtgcggggcggcaaggcgaccatggagcttttgcggactatcacctaccagccagccgccagcaccaaaatgtgcgagcaggcgctgggcaagggttgcggagcggactcgaagaagaagcggccgccgcagccccccgaggaatcgcagccacctcagtcccaggcgcaagtgcccccggcggcccctcaccaccatcaccaccattcgcactcggggccggagatctcgcggattatcgtcgaccccacgactgggaagcgctactgccggggcaaagtgctgggaaaggtgacaagcggagggcgccgggctgccgggcgggcgggaggtctgtccgggcgaccccaagccgggcaagcccgcggggtccctcgcccgccgcttccgggtttttcgggggtccgatcccagcgcgaggtgggctcctcacctgccctctggcttttgtgcgccggcagcgctggggatcggctttgcattcttagcctcagaactgtgtgtctcccgcagcccagagaaatgcatcttgagtctggaagcgagggctttctacatcagacctctctccctctatctgctcccagggaattttcctgacaagtctcatcagagattatttttcatgtctccccgttccaactccctccataaagctcccctttataaaagaagaagagaaactgtttgaacttgctgtttccagcaatgcatttctcttcatgagggagctttaacgaagtcgaatgcctccctctgtccaccctcctccattcctcaatttttttttttttgcttttctttcttcccatttatttatttatttaaaatatctgccgtccatttttgtgccatcctcaattccgtctcggctttgtttcctttcagggtggctttgcaaaatgttacgagatgacagatttgacaaataacaaagtctacgccgcaaaaattattcctcacagcagagtagctaaacctcatcaaagggaaaaggtgcgtatgactcttgagtaaagtattttctttgtgtgcaaggatggcccttccctgttaggaaaatgtcttctgcatgtgtaatcactggcttttccgaggtgactggaagctaataagccttaccttgctttttcatttagattgacaaagaaatagagcttcacagaattcttcatcataagcatgtagtgcagttttaccactacttcgaggacaaagaaaacatttacattctcttggaatactgcagtagaagggtaagtgtcaactcctatttgagaacatttgcttaccccgaattaacatggtattcaaagagtattttatctgggattttagctgtggcagcacttacactgcaaagttaactttcattgctcatcctgcaaagggaaaccagtgattttgataactgttttgacagattctcttttttccttctcctcttcttagtcaatggctcatattttgaaagcaagaaaggtgttgacagagccagaagttcgatactacctcaggcagattgtgtctggactgaaataccttcatgaacaagaaatcttgcacagagatctcaaactaggtaagtcattgacgccaaaagctgagttttgtgttagagttcttttttctctctctgtttttttttacatattaatgttcttaattgggatctcgtgtctgcaatcttgcttttgaatgggcgactttcatataacaattggctgcctggctccaaagtggatgtgtgtgtacttggttagaacgcattttcaaagggattcacattttgttttgtttatcgtctagggaacttttttattaatgaagccatggaactaaaagttggggacttcggtctggcagccaggctagaacccttggaacacagaaggaggtaagagtcagaaagatgcatcctagtagacttttgtggagaccaaatatgccttcattattttgcatttaatgtttcagaggtccggtaataaaatctataaatcatagcaatgttaatttaaagaaatacttattaaatgcccactatggactagacagagcaccctgtgcctctaaattgattatgaaagcagtcaatgaagtcttttcttggcttaaaatgtataaaatgccacgacgtccctggctttagttggttaacaacactttgcatgtgggctaaaacaacgtgtgtgcatttttaaaaattaccaaaactcatttggtcagatctcaattgaattttcagatgccaaaagtcaaatgtttccaaatagaaattcagtatagattttaagattttgtttaagattttgtctcccatcaagtcatgtcaagagaaccaagtttaagtagtggaatagttcctaacacgatctcaatattttgtctttccagaacgatatgtggtaccccaaattatctctctcctgaagtcctcaacaaacaaggacatggctgtgaatcagacatttgggccctgggctgtgtaatgtaagtaaatgcagcagaataattaaaaagcaaattcggatttagattttaacacttgaaaagagttgctttatgaccattgctaaagatgtgtttctttgcacacaggtatacaatgttactagggaggcccccatttgaaactacaaatctcaaagaaacttataggtgcataagggaagcaaggtatacaatgccgtcctcattgctggctcctgccaagcacttaattgctagtatgttgtccaaaaacccagaggatcgtcccagtttggatgacatcattcgacatgacttttttttgcaggttggtgcactatcttttttttttaattacctggtattgatcccagttacctgacaggttactgaaggctttttctaatattccacagggcttcactccggacagactgtcttctagctgttgtcatacagttccagatttccacttatcaagcccagctaagaatttctttaagaaagcagctgctgctctttttggtggcaaaaaagacaaagcaagatatattgacacacatagtaagttaacaagacttcttttcctttttcgtacccaatattatatttaaatttggtaaattagttaaaagagaattttatattagcataacttggccatatttgcgtattcttaaatgttgatatttatagcataataaatccataccttgaattgtgattgatagctttttattttgcaaacactaaagagggcttttgggggtagctgcagctaaaggcaaaggtaaaatgctatttttgcccaggatgctcataagttggtcaataatgcaagaaggagaaaatatgactaaccctgttcctaccttgttaagatagactaatgtttgtaattctgtttcttgatatacagatagagtgtctaaagaagatgaagacatctacaagcttaggcatgatttgaaaaagacttcaataactcagcaacccagcaaacacaggacagatgaggtgtgttgggaaagagtaaagtagatactcacgctttacgttatttccactctttattaattagcacttggactatgattatcatggttcaaatatgtcatatttacttaaagtttttcttcaaaccctttgaaagggaagttaaaactaaaaggaagtcttttagttttacagtgcatgcaagtgagtttactgcgttatcttttatctggcttgtgtccattgctttttgatgagctttcccagcaattgcctcactctcatcttaatctggaattctcacccttaaatgaatttagatgcttgactcattgcataaatcttctctcttctaaggagctccagccacctaccaccacagttgccaggtctggaacacccgcagtagaaaacaagcagcagattggggatgctattcggatgatagtcagagggactcttggcagctgtagcagcagcagtgaatgtaagtggttgtcaatcgtattttaaataatgaaactcgaaatgccagtgctaaatacataataatttaagtcaatttactttgtagcttaatttaacatagaagtagtaagattacaggaattggaaaataatcttgagttctatgtctttcgaattaatggagtgaaacttagcatctaccaaagcctgaggttttattgctaaaatattgtataacttgaaacatttctgtctgacttttcaggccttgaagacagtaccatgggaagtgttgcagacacagtggcaagggttcttcggggatgtctggaaaacatgccggaagctgattgcattcccaaagagcagctgagcacatcatttcagtgggtcaccaaatgggttgattactctaacaaatatggctttgggtaccagctctcagaccacaccgtcggtgtccttttcaacaatggtgctcacatgagcctccttccagacaaaaagtaagtgtatcaattaatgaaatcctgtcagttctctagtcttgcactaaagaaatctaaaaacaatgattaactgcttctatttttttttcctcttctctccctttcgttcctgtttttatagaacagttcactattacgcagagcttggccaatgctcagttttcccagcaacagatgctcctgagcaatttattagtcaagtgacggtgctgaaatacttttctcattacatggaggagaacctcatggatgtaagtactgtggctttagagtggtgacatttgaagtgtaggccacaaagcagtagtgtctgcatcactttgaagcttgttagaaacagattctcctgacctaccgttggtgtactgaatcagaatctccgggaggtggaggcagggatttccaaagccattctgatgcttgcttaagtttgagaggattttcttagaataataatagagtgcatgctacaaaatctttgtaggcactaactcactctcctaatctcttccagggtggagatctgcctagtgttactgatattcgaagacctcggctctacctccttcagtggctaaaatctgataaggccctaatgatgctctttaatgatggcacctttcaggtaaatgaactcttcaggaaagtgcacgtttaggtcctaaacagaaagatttgtacctagacagtttagtgattgactgaacttttctaattctcgaatattttgagagatctaatgtctatgtttattttttaaggtgaatttctaccatgatcatacaaaaatcatcatctgtagccaaaatgaagaataccttctcacctacatcaatgaggataggatatctacaactttcaggctgacaactctgctgatgtctggctgttcatcagaattaaaaaatcgaatggaatatgccctgaacatgctcttacaaagatgtaactgaaagacttttcgaatggaccctatgggactcctcttttccactgtgagatctacagggaagccaaaagaatgatctagagtatgttgaagaagatggacatgtggtggtacgaaaacaattcccctgtggcctgctggactggttggaaccagaacaggctaaggcatacagttcttgactttggacaatccaagagtgaaccagaatgcagttttccttgagatacctgttttaaaaggtttttcagacaattttgcagaaaggtgcattgattcttaaattctctctgttgagagcatttcagccagaggactttggaactgtgaatatacttcctgaaggggagggagaagggaggaagctcccatgttgtttaaaggctgtaattggagcagcttttggctgcgtaactgtgaactatggccatatataattttttttcattaatttttgaagatacttgtggctggaaaagtgcattccttgttaataaactttttatttattacagcccaaagagcagtatttattatcaaaatgtctttttttttatgttgaccattttaaaccgttggcaataaagagtatgaaaacgcagaaa

SEQ ID NO: 434 - DNA, 226204 bp, Homo sapiens
  source 1..226204: mol_type = genomic DNA; note = NC_000017.11:c1229722-1003519 ABR [organism=Homo sapiens] [GeneID=29] [chromosome=17]; note = NC_000017.11:c1229722-1003519 ABR [organism=Homo sapiens] [GeneID=29] [chromosome=17]
gaggaggcgcgagggcggaaggggacacttgactttccctctggtctcttcgggggccgcggggaagggtcggcgcggacggagctcggggcatgtgggacccccgcgcgttcgagcggcgctggcgggccgagttccccggggcggaggcgccggtcccgaggctggagtcggtgcgggacgcggagcgggagctggagcgccgcagactcaacctggagcggctgcaacaggtgctggcggaggagcagctcaaagcctcgctcccgcaggccgcgctggcccggggcggcggcggagactccggggagcccgggcgccccgaccccgaggccgagtctccccgcggggaccccgggcgccccgaccccgaggccgagtctccccgcggggacctgcccgccgggcccggggcggccggagaagccggcgggggaaggagctgggccgacgccgtccaccggcagctcctgcagccccagctgcggttccgggcccgggaggacgacgcgcccctcggggacccccaggcggctcccggcacggacgaggggggcgacggcggcgaccacgacttcgagatggtggatttcaacgagaagttcatcctcagccactggctggtggccccttgccggttcgggacccgcgagcgggcgcgcagcccccgccgctggatgcacctgatccccggggggcggcggccgcagcgggggacccgcgacctggagcagcgggaggccgaggccaagggccgcccgggctcgcccctcgccgcggaggagacccccgggcgcgagcacctgcccccgtggcggcgccgcaggttcctgcgggtgcccgagcgggactcgcccggccacagctcgccggagagagacagcgacggcagccggcacagctccgaccgcgaggacgacttctccgcaggtgggcgccccccccagaccccgctcgaccccgccgcgcgccccccaccccgggctgccgggaccccttcccggccgactccgcggccctgtttaacctcgagctcggggccggggagcgggcgggaaggagggtgagctgcgcccgtgtaccccaaagccacctgtggagcttagaaaacacgtgcaaggcgacgttaagctcgggcgactctatgaaaatgaactggcggcggcggcagggccggcgcccgggcctttgcgctttgcgctccgtggccctgacatcccccagcccctccctccggcctggcccccgccagatcccttggcgccaccgggtgctgtcacccttctgtctgtcacccctctctgcacacaccccaggggcttcccatctcccggaaatccccgatccttctgagctccgctttcctaaccgcggaaggccgaaccttccactccattttctgaacttagtctcctcttctccaggctgctctgtgtgttggggccacgtgcaaacttcagggaagggccacggccctcaccagccccctctgcggactcgttttcttcttagaaggcggcgcccggcctcttggctttctaggagtctgggagcaagagggcaaggggaggcttaggcccatctcgttttccggctggcctggtgcccagagaccatgtctagtccagcgtcttcactggataaaagaggaaaccgaagctcagaaagattaagtgctcgttggggtgagctgagaccttcaccgggtctcctgtcatctctctcccctcgcatctgctctcttttctgaggacagggcctgatcttagtcatctttgaacccccttctggtagtatgcacggtgctttgcagcagtcaaagctcaacgcataatggctgaataaatgattgcctggaattgagcgtccaccgagctctttctaggtcagggagtgggaatggggctaaggaggagaggtcaggtggggatgggggtggcgtgggagccctttgctgtgtctgtgaactgtcacggtctcctcagccacgcggaaagcagcacactggtggtgtccggttgggtcaagctgcaaccaggaatttaagatgccttcctgctcagtgaaggaggaaaaaaaatcattgatgctgggattgttccaaaatctccattattagattttatctggatgagtttgcatttgaatgaaaaactgtccactttgctaaaagcacagttggaaggtccatcaagtcatctgttttgatcaattacacttattccttagcaaagattggctgtgtttcccacaggcaatgctcttgccgcccatgctggtaacatttttatatgtctctttaacttaagggaagagcctgaagatttcaccctagtgccaagttccaaatgcccttggtggaggctacccaactggccccagctgcttcagagctggctgcaatcctgtctccccccagacccacatctgtcaccctccccggggtgcccagtacactaggcttttcccagggagtgatttttatttctgtgagtcgtcgcctgtctcccttaggacactctagcacatagggcaccttgatgcacgttagaaatcggcgctgcccctgggaattgcaaaagatgctcccctctgggtggaccaatgataacaagagtcaccttcctcaggactacagacgtgagctggggcacgtgtctggcactcacggctttggctagtgatgcctgggctagatttcaggtgccattccagccccctctgcagggcaagctcctgtggcacactgcacagctacatgttcgggttctgcctctgtctccaaagcctcctcgtgaggaagtgagtggggggtggacttgcacttggttacatgcatgcacacataaatgcatagcagcacatgtatatacatggtacactgccacatacatgcatgcacacatatacacacacacctgcacacgtatacacatggtacactgtcacatgcatgcacacacacgcacagcagcacatgtatatacgtgacacactgccacatacatgcatgcacacacacacacctgcacatgtaaacacatggcatactgtcacatacatacatgcacacattcacaccttcacatgtacatacatgcacacacacctgcatatgtacatgtgcacagtgccacataaatgcatgcacacacatacctgcacacctgcacacgtatgtacatggcacactgtcacatacatgcatgcacacacatgcacacctacacgtatacacatggcacagtgccacatacatgcatgcacacacatacacacctgcacacgtatatacatggcacactgccacatacatgcatacacagacacctgcacatgtacatacatgtgcacactgccacatacatgtgtgcacacacaatctaggagaaagagccctcaagcatacagggaggcattagagtggagcgattaagggaaggcgttttcgcactgtgggaaacagctcattgaaattagtgcagttggcaacagaagcacccgggcggtcttccttggccacccttgtcctttgttgcttcatttttctctacagcattccccaaattaccaccgtggatgctgcaattttgcatgtgggtcttattcactgtctccctccagtcaaacgcaagctccaggcaggcaggggtttttctctctcaagatgagtgcattggacacggcgagtattattctgtttttggactccgtttcggttctatgcggacgcgtatgtgtacactgggagctgatgtagaatgtatttcttgctgtgagatgaacaaaaaggtttgaaaacacggaattaaaccatgtttctgaagctagactgcctgtgtgacattgggagaagttatttgacttttctgagcctgagtcccctcatctgtaaactgaggctaataagcacctcttctctcctgctgttgatatgagaaataaatgggtcatatttctaaagcgttttggacgggtcctggcacgtaggaagcacccataagtgttaattaaccactactacaggtcatttttctttgagttgcttcttctttctttttcttttttgtcgagacagagtcccgctctgtcacctagactggagtgcagtggcgtcatctcgggtcactgcaacccctgcctcctgggttcaagtgattctcctgcctcagcctcctgagtagctgggatgacaagagtgtgccactacgcctggctaatttttgtattttagatgagatggggtttcaccatattggccgggctggtcttgaactcctgacctcaggtgatccgcctgtctcggcctcccaaagtgctaggattacaggcctgagccactgtgcccagctgagttgcttcctcagagcttcccactccccagtcattctggatcgcagatggtttggttttccgtggtgcatgtggctggtacaatggctcacacctgtaattctagcactttgggaggctgaggtgggaggactgcttgaggctgggaatttgagaccagcctgggcgatacagtgagaccccatttctttctttcttttcttttctttttttttttttttgagatggagtctcacggtgttgcccaggctggagtgcagtggtgccatctgggctccctgcaagctctgcctcctgggttcacaccattctcctgcctcagcctcctgagtagctgggactacaggtgcccgccaccacgcctgtctaattttttgtatttttagtagagacagggtttcaccgtgttagccaggatgatctcgatctcctgactttgtgatccgcccatctcagcctcccaaagtgctgggattacaggcgtgagccaccgcacccggtgagaccccatttctaagaaaaaaagaatcagtcagttgtggtggtgtgaacctatagtcccagctactcaggaggctgaagtgggaggatcacttgaacccaggaggtcgaggcttcagtgagctatgattgtgccactgcactccagcctgggtgacagagcgagtccctgtctctaaaaaatatgaatgaataagatacgtgtttccccctcccagcaaggctctgactctttctagaacctttcaggcagcagggcaggactcaaggcagaggtcatcttggctcatgagtctctttttgctggattggcctccaccagcaatcacactcattatctgcattcagaggtccttaaggtcaggttttattgggcaatccaggctttgccttagtctcagggtttcagagagagaacacgtgaggcctcacctacagaggcccagaagcagaggtgaaaagggcctccatttccttttagatgaggggcagattcctaagccaaaacacatttcggcttttttgtccgcgcacgatagcaacatcagagtgtaaataagttagtctgccaattcgcttagtatcttccttctagtaccttgtagccttgcttggtaccaggaaagacaaagaccaggccgtgttggtgtggtgaggagtgaggggacgggcagagccaggatcagctgtgttgggtggtgcgtgctgtgaagtcaggcctgcctctccccaggtgtgagaccaccggccagccactgacccttccaagcctccgtctctgacagatgggaataataaacgtcgctaaccctaagggcttacttttgccagctcctgttctgagcacttcgtatgctttaattcatggattccacagagcaccttcgggagacaggcactgatagggtttggctctgtatccccacccaaatctcatctcgaattgtcatccccacgtgtcgagggagggacctggtgggaggcgactggatcatggggcggtttcccccgggctgttgtcctgatcacgaggggagttctcatgagatctggtggttttaaagcgtttggaagtttcccccgcaggcttgcttgctctcctgccgccttgtgaagaaggtggttgcttttcctttgccttccgcggtgattgtaagtttcctgaggcctccccagccttggggaactgtgagtcaattaaacctctttcctttataaattacccagtctcgggtagttctttacagcagtgtgaacacggacaaatacaggtgctgttattatttccattttccatgagaatcacgaggcctggagaacttcaataacattgcccatggtcacccagcttataagtagcccttaggatttgaagccaggcagtctggcttccaggtccatgctttcgcacaccaagctgtaccgcctcaaatattagtacttccctctcaggatagttacgaagattaaatgcaagagaataattaaagagtgtagcagaacacctggcgtagagtgacgatggagggtattcgtgtctctgtgtgtgtgtgtgtgtgtgtgttgttactgattttttgtttgtttgagatggagtcttctgagtagctgagattactggtgcccgccaccaagcccggctaatttttatattatttatttttttgagatggagtatggctcttgtcaccccggctggtgtgtaatggcaagatctcggctcactgcaacctccgcctcctgagttcaagcaattctccagcctcagccccccgagtagctgggattacaggtgcccgccaccacacccggttactttttgtatttttagtagagacggggtttcgccatgttgtccaggctggtcttgaactcgtgacctcaggtgatctgcctgactcggactcccaaagtgctgggattacaggtgtaagccactgtccctggcctattttattttaagacagggtcttactctgttgcccaagctggagtgcagtggcatgaacacagctcactgcagcctccacctcctaggctcaagcgatcctcccacctcagcctcccatgtagctggaactataggcacatgccacgagccggctaatttttaattttttgtagagacggggtctcactatgttccccaggctcgtctagaactcccgggctcaagtgatcctcgctccttggcctccacaagtgctgagattacagatatgagccaccacacttggccctgagactttttatttttaatctttatgggaaatgaatttcctactaagtagtcatgttacctgaacctgattcatctgtaacctgatgggttttctgcccttcccatcagtgactaatgagattgttgctctaggaagaattccttgtgttcagtggatgtctgagtaacttaatttgaaggattgaattttcagcctcagctgtgatagagtaattttttcccatccctattgtgaagagatattaagaagccatttgaggccgggcgcggtggctcacgtacgcctgtaatcccagcactttgggaggccgaggtgggtggatcacttgaggtcaggagttcgagaccagcctggccaacatggtgaaaccccgtctctactaaaaatacaaaaattatccgggcagagtggcacatacctgtaatcccagctacttgggaggctgaggcaggagaattgcttgaacccgggaggcagaggttgcagtgagccgagatcacgactctgcactccagcttggtgacagggtgaaactccgtctcagaaaaaaagatgggatcctccatggtgctgttatcgttactcttcctcgatggtgtctttattgttgctgttataagtccaggaattttcagttggctaaaccaggctactgcttatatttgaatctctccaggtaataaagtttcccaagcttatttgtttgcctttctctccttttttacttaccgctgtccctactccagaggtgttttgcatcttcagaggaagacaacctttccaggtcccctggggtccctgatgcttccccgtcaagccctgtctctcttggcgtctgcaaagccaccatctggcttcttatattctgttttctacgcagatcctttctgccattgctcattccatccggcgtcttttcccgtgccctttctggcgtttgaagagccctcccgccttgacttccccaaaccagcccccaaaccaacccctcctttaagggctgattttccgtggaacctgggattggtcgataggggtttgctgtatatgacaaaactgaaaaaaagtagcttaaacaagatagaggcttatttatctcacatgtaacagaattccagcggccagcagtccggccgagagtatggtgactccatgatcatcaggaatggaggcttttcagtctttctgcttctctgtcctcaagctcacctcctggtccgaaatagctgctggagatccagccatcacattcacatttcaggcaggaattagaagaatgggaagaggagcgtaagagtgagtggtggctgtttgtctgccttttaaggcactttcctgggaacctctcttgacagtttctgtttttatctccttagtcacctcgaggtataagagaggctgggaaatgcagtattttatctgggtgtatggccacctcaagtaaaataggggctctgttacaaggaaaaatagaagaattgatattgcgtaggcagctagtggcctctggcacagccttttccaacgactccaacccatcttgcggttcttagagcgggccccacacggcacaattgtcttattattatgccatctattaatttattgagtcagtaaacaaataacaacggagccacggccctgtgcaaggcagtagccttttacatgtttactgtgaagagctgctctcaaactgagtggttagctgactcctggaaagcggggaccgtcgtttagaccccttttctctcccacaacagtatctttcacagggctgggctcatggccggcactcgataagttcctggttgattttagaatagtcacgaatgagaagttcagtgaaaaaaatacattccctgccttggtttactgtgctggaaaatgctggttgtgtaaggttcgtttttagcttgttctggttttgaggaacccattgcaaggagggtggggagtgggtcacctccaaacatcagggctgtgttgtagtcacagggactcgtcgtccaggtgttggggcagatttggctgttttggaaactgggctctgtataccatactagaatcataagcagaaatccccgtgaccacctgactttgcaccaccgctctgtgtagctgtatttacaccacgtgagtctgtcctgttatttctgcaccgcgtagctgcagagtaaatctgcaagtctttccgcagcgatcctgttcctgtcttcccattcgacgctcgctacagtcggcctgagataacactgtctgaggggaggctgcctggacctcacgtcgcgtttttcaactgctgagaaaaatgattactttaaattttttttttttttagacggagtctcgctctgtcgcccaggctggagtgcagtggtgtgatcttggttcactgcaagctctgcctccgggatccacaccattctcctgtctcagcctcccgagtagctgggaccacaggcgcccgccaccacgcccggctaattttttgtattttgagtagagatgggatttcaccatgttggccaggctggtgtcgatctcctgacctcgtgatccgcccgcctccgcctcccaaagtgctgtgattacaggcgtgagccaccgcgcccggccactttaaaatttttattgacacagagctgggaaggaactagagtataaagatactccagtacctactctctgcaaagcactaggtcaagtgctttacctacgctgtcacgttgaatttttagaacagcctcctattgggcagatggggagactgaggctctgactggtccaccagcaagcccaagatctcttagtgctaagtggtggggttattctttcctcagttttaaaaatcaattattttattttatttttttggggcatggagtctcgctgtgtcgcccaggctggagtgcagtggggcaatcccggctcactgtaacctccgcctcctgggttcaagcaattctcctgcctcagcctcctgagtagctgggattacaggcgagggccactgtgcctggctaacttttgtattagtctgagattttaatgggaggctggtcacataggcacatcgtgctatacaaccagccatggcaagaaaaaataaggaccgcaaaaatgaaataaatccagatgcacatcatcagtcttgacggcttatgcaaaggaaaatgatcagccttacaggatggttcattgctgcaggtgcaaggttattaaatcactaacatagtgagaaggatcctccttgtcacccatgagccaggtgtgtgaggccatggctgggcgtggtggctcacacctgtaatcccagcactttgggaggccaaggcaggcggaccatttgagctcaggagtttgagacctgcctggtcaacatggtgaaaccccatctctactaaaaaaaacaaaaattatccaggcgtggtggcaggcacctgtaatcccagctactcgagaggctgaggcaggataattgcctgaacccaggaggcagaggttgcagtgagccgagatcgcgccactgcactccagcctggacaacagagtgagactctgttacaaacaaacaaacaaacaaacaaacagatagaaaaggatactagaattaagcaccatgcaaacctattgtgttcctgatgtcattgacctagtagtatattaacttcatttgtgagggtggaaggcctaaagatctgattgctcagctctctgaaaaacgcgatttccttggggattttgcacatttggaatgtataaggaattcagagaagtctagaagtacactgcagttttccaaggtctctgttcactggacttgggggcccatcttggtgacctactcatcacttacagcattatttcaaatcataaagaacagactcatcggccaaagtttgaaatcgtccatttgtaatttggggacagctgactataatgagatggttttggcatgccgaatgttgagcagaagtgtaggttacacacatactttaatcagtatgttcccatgagactaaggatcattcttctcattctatattaacaagtctagagacattgagtcactggtctgtagtcacacagctcacaaaggacagagccaggattggaacacagctctttctggggccaaagttattctctactccagctcaccactaactgttaacctctccagactatagcttttcactttaaaataaggtgactggactagataattttcccgacagacctaaattttatggacgccagtaagttaaatgagctgggactacgtaccaagtaaggttaagagcctggctttgaatcagagaaactgggtttggatccaggctgtagccacttgttattttgtgtccttaaccaagttaattcacctgtctataagcttattttcttttctatacaatggggatcattgtacctcacttggtgttgcaaaggttaaatgaaataatgtagcatggggtccggcatgtggtgagctccgtataaatgaaaacagctactggtgtgatgatcaagagcatgctgtccgaggtagcggattacttgaagtcaggagttcgaggccagcctggccaacatggtgaaaccccgtctccactaaaaatacaaaaattagtcgggcgtggtagcacgttcctgtaatgccagcactttgggaggccgaggcgggcggatcacctgaggtcaggagttcaagaccagcctggccaacatggtgaaaccccgtctctgctaaaaatacaaaaattagctgagcatggtggcacgtgcctgtaatcccagctactcaggaggctgaggcaggagaatcgcttgaacctgggaggtggaggttgcagtgaactgagattgcaccactgcactccagcctgggccacagagcaagactccgtctcaaaaaaacaaaacaaaataaataagagcacgctgtctaggaccacattgcctgggttcgattcacggctctgccacttaactgctatgtgaccttgagcaaattcctcaacctttttgcacctcagtgtttatatttgtaggctaggggacgatgataatataatatcaatagtcaagtaagttggcgtgaaggttaaataagtcaatatgtatataacataccttgaaccagacctgacacatggtaaccactcagtacgtgttggttaattttatgattatccccactgttactagtttggccatgcttcttgctgaaatagactataaaggtgaaacatggtatcttgctcatcttgttgcctggtcataaccttaattgaaactgaaaatcctgtaatttgaataatccaagagctggaacagcgaagcatccaattacagacgcgtcacggctgcagccttgggggggacggtgaggcggccgcactgtgctctggggttggggtcctattacggagaaagcctcgttttgtaggcagctgcctcgccttctgtttggctgcataattgcgcctttccgttttattttaaagcatcttgaggaatccagagcccactcctgctgacagcagggaaagccgccgcatgtcccatctctaatgagcctccatgatgctctgtggccccacctaggcagcaggctgggctggcatccgctggctctctgagcacagctcaccatgctgggcttcattatggggctccctgaacacccctaggatccccccacgcctgtcctcattgtctcagagggcacagagtggcttcctgaatgccgagcttgttggtaacctttgtgggctggcagtgagcacgcagaaattaattattcatatcaatgggctgaaggagctgttgttcactgaggtgactcccctttggccaccagacccagagttccccagggtctttagacaggcagaggacagcgcagtccttagagacagctgcaacagcagggtggcacgtggccggccccaggctaagtgcagtctgctgatgtgctttgtttgggctacagagggttaaaacaaaattggatccatttaaaaccaggttttacctagcaatctggatttctggattttcttgaaagatgggaagatgggcaatgtgaatgggaggcattagttagagccgacgggccccttcaggctggacgtgattttgccaatggcgtcagctttcctctggcccctttctccacttctgacgtgagaggagtgagtctagtgcagggaacagaggaagactcggagctgggtttgcggctgcctctgctactcactcctgcgtgactctaggcaaatgacacagcccctgtgggccccgctctcctcctctggagcagggggttataacagcttccctacctcgcagatttgtgagaactgagcaagttgatataagggctgagcctggcacatagtaagttctatttaggtgttcagtttctttctttttttttttagtatttattgatcattcttgggtgtttctcggagagggggatttggcagggtcataggacaatagtggagggaaggtcagcagataaacaagtgaacaaaggtctctggttttcctaggcagaggaccctgcggccttccgcagtgtttgtgtccctgggtacttgagattagggattggtgatgactcttaacgagcacgctgccttcaagcatctgtttaacaaagcacatcttgcaccgcccttaatccatttaccctgagtggacacagcacatgtttcagagagcacgggggttgggggtaaggtcacagatcaacaggatcccaaggcagaagattttctcccagtacagaacaaaatggagtctcctatgtccacctctttctacacagacacagcaacaatccgatttctccttcttttccccacatttcccccttttctattcgacaaaaccgccatcgtcatcatggcccgttctcaatgagctgctgggtacacctcccagacggggtggcggccgggcagaggctgcactctgggcactttgggaggccaaggcaggcggctaggaggtggaggttatagtgagccgagatcacgccactgcactccagcctgggcaccattgagcactcagtgaacgagactccgtccgcaatcccggcacctcgggaggccgaggctggcagatcactcgcggctaggagctggagaccagcccggccaacacagcgaaaccccgtctccaccaaaaaaatacgaaaaccagtcaggcatggcagcgcgcgcctgcaatcgcaggcactcggcaggctgaggcaggagaatcaggcagggagcttgcagtgagccgagatggcagcagtacagtccagcttcggctcggcatcagagggagaccgtggagagagagggagagggagagctctttcttttcttttttttttttttgagacagagtcttgctctgtcacccaggctagagtgtagtggggagatctaggctcactgcaatctctgcctcctgggttcaagtgattctcctgcctcagcctcctgagtagttgggactacaggcacacaccatcacgcctacctaatttctgtatgttttgtagaaatggggttttgccatgttgcccagggtggtcttaaacacctggactcaagcaatctgcctgcctccacctcctaaagtgctgggactataggcgtgagccaccccacctggtcaagagcaatacttttttggtctgagtattttatttggagagaaatagaacttggccattgagcttatatacaccgagatagctgccacattacagggaaaaactatgtacaatcaaatatatatatttttttctttgaggtggagtttcgctcttgttgcctaggctggagtgcagtggcacgatcttggctcgctgcaacatccgcctcccaggttcaagcgattctcctgcctcagcctcccgagtagctgggattacaggcatgtgccactacgcctggctaattttgtatttttagtagagatggggtttctccatgttggtcaagctggtctcgaactcctgacgtcaggtgatctacctgcctcagcctcccaaagtgctgggattacaggcatgagccactgcacccggccaggatcagaatttttatattcaaatcttaaatctctcctttatattcctttaaattgctattaactgtagatattcagcattgttagggtaatttaaacttgttaaggaataatttaaatattttgcctaagtcatccctggggtggtggttactcatggagaggaaatatatatatatacacacacatcctagtatcatagattccaaaaactgatgaaagccaaaataaatgttcattttaggttgaagggacctgaagttagcttatctttaggtttaaggtggtggtggggggcggggaagtccaagtcctgtgtaacatttcacatctcaggccgggagcggtggctcatgcctgtaatcccagcactttgggagcccgaggcgggtggatcacaagatcaggagttcgagaccagcctgaccaacatgatgaaacctcttctctactaaaaatacaaaattagccgggcgtggtggcgggcgcctgtaatcccagctactcgggaggctgaggcaggagaatcacttgaacccgggaggcggaggatgcagtgagccgagattgtgccattgcactccagcctgggcgatagggcgagactcggtctcaaaaaacaaaaaacaaaccatttcacatctctccaaaatagaaacagcaccttagactgccttgttttcacagttttgtcgctttggaaccatagagtctgtcatctttgaagaagtgaaatcactgtggggttaagacagtatctttgcacagtttgcgtgcaatctctgagaagctagcacagaaggacttaggagttaagaccgtaacctttggccgggcgtggtgcctcacgcctgtaatcccagcactttcggaggccgaggcgggtgagtcacgaggtcaggagtttgagaccagcctgaccaacatggtgaaaccccgcctctacttaaaaaaatacaaaaattagccgggcatagtggcatgcacctgtaatccaagctactcaggaggctgaggcaggagaatggtgtggatctgggaggcggaggttgcagtgagccgagattgcacccctgcactccagcctgggggacagagcgagactccgtctcaaaaaaaagactgtgaccttcaagctctgcagccttaattcacaccaaatagtacctgcttagtcacctaaactatggccacgtcttcctgctctttggatgccccttagtttgctagttgggtctcaaatcatggtctttaggtgaattaatggccggcacagtgtttgggagaaaaacagaatctgcagcttcacatctcatcatttcctgggctgagctgtctcccaccctgagcatattacaaaattaacaggttttagaagctgaaaagtggaaataaccagctttcgtttctgggctgcagcttgtttagtgccacatcttggagaaagctctgtgcgtggttagatgggttgactctgattgtctgcagctccattcaaggatttgttgggggaatttcacactcctttagctgtttggtaaaagggtgaaaaatttcttaagtccaaattcccatcccagatacagcttctccccaagtatctctttatctctctctctcttttttttttttagacagtgtctcactctgttgcccaggctggagtgaagtggagagattttggctcactgcaacctccaacttctgggctcaagcgattctcctgtctcagcctcccaagtagctgagattacaggcgtccgccaccacacttggctaattttgtacttttagtaaagatggagtttttccatgttgatcaggctggtctcaaactcccgacctcaggtgatctgctggcctcggcctcccaaagtgctgggattacaggcgtgagccaccatgcccggccaatttttgtatttttagtagagacgaggtttcaccatgttggccaggccagtctcgagctcctgacctcaaatgatccgcccgcctcagcctctcagagtgctgggattacaggtgtgaaccactgtgcctggcgtctctttttgttttgttttgttgttgtttttttttctcttttgagacagtgtcatggtctattgcccaggctggagagcagtggcatgatcagggctcactgcagcctcaaactcctgtgctcaagcgagcctcccacttcagcctctcaagtagctgggaccacaggcatgtaccaccacacctggctaatccttataaaacttttgtagagatgaggtcttgctctgttgcccaggctggtctcgaactcccagactcgagagatcttcctgccttggcctcccaaagtactgggactataggcgtgagccaccatgcccagcctctttgtatctcagtttaacactgtttcattcttcttcttgttatagtaatttttttttttttcgagatggggtcttgctcttgtcgcctaggctagagtgcagcggtgcaatctcggctcactgcaacctccacctcccgagttcaagcaattcttgtgcctcagcctcccgagtagctgggattacaggcttgtgccaccacaccaggctaattttttgtatttttagtagagacggggtttcaccatcttggccaggctggtctcaaactcccgacctcaagcaatcagcctgccttggcctctcgaagtgctgggattacaggcatgagccaccgtggccggccttgttacagtaatttacatattgttcccaccttgctagcattgctgaaggcagataccaccttatggcagtaaaggatgcaggttctggggtcagactgcccacgtttgaacctcagctctaccccttactagctgtgaggatttaaaaacgttatttcacgtctctgtgccttggatatcttatctgtaaaatggatgtgttaatagtgtctatttcctggaatgttgtggggattaatgaggaaatctatggtaaaaaaatcacggtgaataatcaatcaataatgactcctatgattcacgctttgttttctaagcacctgccacaggacctggaataatttagataaggactgactgcaagtcagacacctctgcaggaacagcagaagaagatcgatttttggtggctagctccactgaaatggaatcccactgggtcagagcaaaacctggaatccatatttttatttatttttcattatttatttatttatttatttatttattcatttttttgagacggagcctcactctgtcgcccaggctggaaagaagtggagagatttctgctcactgcaacctctgcctcctgggctcaagcaattctcctgcctcagcctcctgagtagctgggactatgggcgtctgccaccacgcctggctaatttttgtattttttagtagagacggggtttcaccatattggacaggctggtctcaaactcctgacctcatgatccgtccgccttggcctcccaaagtgctgggattataggcgtgagccaccacgctcggccaggaatctctgtttttaacaagctcgggagatttttcagcagccagtccagcaccccagagtttggcaggctttgccaagtgcttgatatgaggtggtaaatgtctggcacctttaaaatatagggccctttccgtccatctggccctacaggttgatgttaaaaggatgcaaaaatacggttctaaatgtccttaagaggctaaggttggtctaagcaaagcatggaggaaaaagcccttttgagtttgtgtgtgagtagataggagttgccagttggttgataaagtgataaagtaatccttttgtgttaggagccaggaagcagagagagaggaaacagcccaaagtgatttttggcttgagagcaaacacaatagcagaaagctgagtgacacctggacgatagtgcagagaagctgagtgacacctggacgatagtgcagacaagctgagtgatacgcggacaatagcatggagaaactgagtgacacctggacgatagtgcagagaagctgagtgacacctggacgatagtgcagacaagctgagtgatacgcggacaacagcatggagaaactgagtgacacctggacgatagtgcagagaagctgagtgataacgtggacgatagtgcggagaagctgggtagcagagatggggtttcaccatgttggccaggctggtcttgaactcttgacctcaggtgattcacccacctcggcctcccaaagagttgggattacaggtgtgagccacggcgcccggcttaggtcagaactttctacgcaggtaaaaagtgacagcccccacagtaccaacacagctgggctgagcttccgcctctctagattctgttactttctacctctactttctccctgtctctctaagagatcagccgtcactaatttagtgctttactaatttaggtgtctttgccatgaaagatatgtgttttctttttttaatttgttggaggttctgaaggcactttggcatatgtatctgttttcttcagcagcaaagatcatcgtggagttaagatggcagctttgttgtgattcgtaaatttgctgaatttgtaaataactggggatacctgctggactttgataaatgcaactttttccagtgcttaaaagaattgctgcagaaaatttagagtgattatacctccaaactgctcaatgaaaaaggtcaacaaaacagtataattatctatgtatatgtgtaactcgtatgtgtgtggggtgtccacgtcaccaagtattagaaagttaagagagaaggatgtggacaataaaacaccacccacttcaaagcaggtgcagagagtaaggcattgtatgtctgattttatgaccacgagaggtcagttctgggctaccataaactctatctggaagaaagggattcaggcaccattcaagcaaactttggctgagcatggtggctcactgggaggccgagacaggtgaatcaccttagtccaggagttcgagaccagcctggccaacatggcaaaaccctgtctctattaaaaatacaaaaattagctaggcgtggtggcgcatgcctgtaatcccagctacttgggaggctgaggcaggaaaatggcttgaacccaggaggtggaggttgcggtgagccgagatcacaccactgcactccagcctgaaggacagagtaagacggtctcaaaaaaaaaaagaaagaaacaaacaggttaaaagagaaggatgtgaacaataaaacaccacccacttcaacgcagctgcagagagtaaaacactgtatgtctgattttatgactgtaagttccaggctcccatgaactctatcaattccaagctcccatgaactccatccggaagaaagggattcaggcaccatgaaggcaaactttattggcacctgcattgagccgagcagtgaaccaagggaaagagttcaaaattctgcttcaggagccttcagtgtaactgtggtactaggctagcaaacaggtgttcactacatacatgtatgtacaagagagacccatactaagcacttgccgtctttaactgacttggcaggcacaaagcaggctttttttttttttttttgagacggagtctcacactctcacccaggctggagcgcagtggcatgatctcggctcactgcaagctccacctcccgggttcatgccattctcctgcctcagcctcccgagtagctgggactacaggcgcccgccaccacacccggctaattttttgtatttttagtagagatggggtttcaccgtgttagccaggatggtttcgatctcccgacctcgtgatccgcccgcctcggcctcccaaagtgctgggataagaggcgtgagccactgtgcccggccggcagctccctcttgaacctctcccttacagagtcaacaagggagcagtggtcagcacttctctaccgcgacgttagcagagaactcgaatctcattagtagcaaggacttctctgccacagatgtggctctgagactggttcttcacaggctgacaggggaccgtggcatgcagtgatggtgtgggaatcacccgatcgagacgcagcacatgctgctgctgttcctggagaggagaatgtcaattcctcagctggccaagggcacttcacactggggtgccctgcgttgctgctcctgacacctagttccttcgggtcacaggcagagctgcctcctgtgtgtcagttgcccaggaaggccaggaagaacaagttctagtatccaccatttcctttccacccagggactcatctgggggtcgagcaacttctcttttataaacactcataactcaatgggtctgctacaccctcattcctagacaagagcagggaggccatctctgatatcaatggccccaaagtggttgatctggacaggtgcggtggctccggcctgtaatcccagcactttgggaggccgaagcgggtggatcacctgaggtcgggagtttgagaccatcctggccaacatggtgaaaccccatctctactaaaaatacaaaaattaggctggtgcagtggcaggcgccttgtaatcccagctactcgggaggctgaggcaggagaatcgcttgaacccgggaggcggaggttgcagtgagccgagatcgcacctctgcactccagcctgggcaacagagcgagactctgtctcaaaaacaaaacaacaaacaaacaaaaaacaaagttactgatcttctaagagaggctgtgcaaggaattacaaagtcataaggtctgtgattccaacagtttccttttttcccccacttctctttttttttttttttttgagacggagtttcgctcatgttgcccaggctggagtgtactggcgccatctcggctcactgcaacttccacctcccgagttcaagcaattctcctggctcagcctcctgagtagctgggattacaggcgcctgccaccattcccagctaattttatatttttagcagagatggggtttcgccatgttggccaggctggtctcgaactcctgagctcaggtgatccgcccgcctcagcctcccaaagtgctgggattacaggtgtgagccactgcacacggccaaatatatgcattttaaatacaaatagatattgtaaaattatccttcagaaaagttgatccaatttatattctcaccttacttctttttgagagaatctgttcacatttttttttttgagacacgtctcactgttgcccaggctggagtgccagtggcacaatcacagctcactggcacccttgaactcctgggctcaagcaatccttccaccttagcctgtggagtagtagctgggactataggcacgaaccacaatgcctggcttttttttttgtttgttttgagatggagtctcactctgttgtccaggctggagtgcagtggtgagatctcagctcactgccacctccacctcccgggttcaagcaattctcctgcctcagctcccgagtagctgggattacaggcgcatgccaccacgcccagctaaattttgtattttaagtagagacggggttttaccatgttggccagggtggtctcgaactcctggcctcaggtgatccacccaccttggtctcccaaagtgctgggatgacaagcatgagccaccgcgcccagcctaatttttgtatgtttttgtagagatggagtttcacaaatttcacaaaatatttttggagacatggtgaaacccaatatctggtgagctggtttgcagaccaactcaggctagcctcaaactcctggactcaagcaatccacccaccttggccattcaagatcaacccatctaaccacaagcacagagctttctccaagatgtggcactaaacaagctgcagcccagaaacgaaagctggttatttccacttttcagtttccaaatgcctgtcatcctggctactcaggaggctgagacaggagaaccgcttgagccctggagtccaaggctgcaagtaagctgtcatagtgccactgcactccagcctgggtggcagagcaagaacctgtctctaatattaataataataaattaatgtagtgaatcatgcagattgtctaatattgagctaggcttgtattcctgggataaaccctgtgtgatctaaggggtcaagggatgctcggttgtgcacgcaacaacccagtcacgtggcagttacactataaacgcatcagtgtctaacccatcacagtgatgtgacgtcagtggtcacatgagagctcactgcagcctcaacctctctggctcaagtgatcctcccgagtgtgccaccacacccagctaattttgtttctcttttttttgagacggagtctccttctgtcaccaggctggagggcagtggcgcgatctcagctcactgcaaccgccacctcctgggttcaaataattctcctgcctcagcctcccaagtagctgggactacaggtgcgcgccaccacgcccagctaatttttgtattttttttttcttttttcgagtcggagtcttgctctggcgccaggctggagtgcagtggcgcaatctcagctcactgcaaccgccacctcctggttcaagtgattctcctgccgcagccttctgagtagctgggactacaggcatgcaccaccacatccagctaatttttctatttttagcagagatggggtttcaccatgttggccaggatggtctccgtctcttgatcttgtgatctgcccgcctgggcctcccagagtgctgggattacaggcgtgagccgccgcgcctggccaattttggtattttttgtagagatgaagtcttactatgttgtccaggctggtctcaaactgctgggtcaagcagtcctcctgccttggcctcccaaagttctgggattacagacgtgagccactgcacccagccaatgcattttcaatagaaaagattcaaacgctactgaaatcttggaaatgaagcctgtcatttcctgtcacctctccccccgaccccactcctctctccagaaggagcctacagaacaggctgttacagatgatacattctcaggcctttcacggcatgcttagaagtatttgtatctcatttgtgcactgtttcatttattctcacaaccagagaggtttgtattattagcccccatttgatgtatgagaaaactaaggcttaagaatattgggtaatgtgccaaagggcccagagctcattacagtctcttaataatggggataaaaccgggtatggtggctcaggcctgcaatcccagcactttgggaggctgaggtgggcgggtcacctgaggtcaggagtttgagagctgcctggcttacatggtgaaacctcatgtctactaaaaatacaaaaattagccgggcgtggtggtgcacccgttatcccagctacttgggaggctgaggcaggagaatcactttaacccaggaggcagaggatgcagtgagccgagatcacgcccttgcactccagcctgggtgatagcgcgagactcagtctcaaaaaaaaaaaaaaaaaaaagaaaaagaaaaagaaaagaaaaaaagaggttctgagaaatgtgtagatgatttcactgttgtgcaagcatcatagtatattttacacaaacctaaatacaaaaatcacctggctgtatatttcacacaaacctaaatactaacatacagcccaggtacatagtaggctcaatggtatagcccactatgtgatatagatatgatatatgatatagacagcttactgctcctaggtacgaacctgtatagcaggtcactatactgaatactataggccgttgtaacacaatggaaaatgtttgtgtatctgaacacgtctaagcgtacaaaaggtacaggaaaaaatacaggattataatcttctggaccacctttgtatatatagtcctttcaggtcatatggctcaggactgtagtttgaacccatgtttctcattttttttgtttgtttgttttttgagacagagtctcgctgtgtcgcccatgctggagcgcagtggcgcaatctcggctcactgcaacctctgcctcccgggttcaagcgattctcctgcctcagcctcccgagtagctgggattacaggcgcgcaccaccacgcccggataatgttttgtattttagtagagacggggtttcaccatgccgtccaggctggtctcgaactcccaacctcaggtgatccgcccgcctcgtcctcccaaagtgctgggatgacaggcctgagccaccgcgcccggcccacattaagtctttaaatgccccgctggggactaagatgcccctggtggaatccaggagccctggtggtggcttctgcggggcccaggccgagatgagggagaggccgggaggagtggactgggctggcccgtgggccgggggtcggtggtttctcgtgccctcccctcggctccagggatttcccccgtgaagccggcaccgaggtccggacaggaaagcactttgagccatggatttatgtaaaatccagatgaggagctggagctggtttctcctcccgcgtcaggcggcgccaccggaacgtcctggcgggacacacactcacgccacaccccctggcgggtctctcgccacgcggagagagcgcccgagcccccttcgccccgcgaggttcccagggtgtaggcaggcccggggggcgccatccgccttcctgcgcgagtcacggacacgacccgggccctgaaggcgtctgcatcaccgctcccgccgaaacctcagaaaccgaggccgaacactcgccgggctcctcgcagcggcggcgggcggtgactcaggggttcccgactggattaaccgcgcctggaggactaggcagcccgggcgacttaccgcagcctcatcacgtgaccaggacctgcggcccccgcccccgcagactccgtccccgcgggccccgcccccgcagactccgtccccgcgggccccgcccccgcagactccgtccccgcgggccccgcccccgcagactccgccccccgcgggccccgccccctcaaggccccgcccccacgggggaccgccccgcaggctcctccccgcggaccccgccccccatggactccgcccccacgagccgggccacgccccctgaggactgcgcgggagcctggctggatccgaagccccttccaaggagtctccccaggatcctctgctcacaccggcaagtgaaagaccttttaaaaggaatggggctgggcgcgatggctcacgcctgtcatcccagcactctgggaggccgaggcgggcggatcacctgaggtcgggagttcgagaccagcctggccaacatgatgaaacctcgtcgctactaaaaatacaaaattagccaggcgtggtggtgcatgcctttaatcccacctacttgggaggctgaggcaggagaattgcttgaactcgggaggcggaggttgtagtgaaccgagatcacaccactgtactgtagcctgggggacagagcaagactccatcttaaaaaaaaaaaaaaagtaatggcaaaaacagcaattacttttgcaccaacctaaatagtagggttcgaggagagctgagctgaccactttctcccaagcagtagaagcttccttgttgaaacaagagggccatttgtctccaaggtctctgtttctagccgcagtgtttcctaaccctaaacctaggcctatttcatcaagggtcagcggattaggagtagatggctatggatcaccttccctttcctaacagggtcttcatttcatgcaacatttgctgccagctcatatgtgaagatgtgaaaagggggcagctggggcctttcagaagagggtcaggaatctgagcctctttgtccataggggaaatactctgaatgcaacttcatcatgagtgggcacgtgtgtgtttggggactgttcgctgaagagtataggaaagagacagccgggatcccctttgaatttgcaatttagaatgagtgatctaagatgagtaataagaggttggagattctcttttgaatgtgcgctctggggctctggtatggctgcatctgttataaagaggttcttgggccaggtgcggtgtctcacacctgtaatcccagcactttgggaggccgaagggggtggatcacctgaggtcgggagttggagaccagcctagccaacatggggaaaccccatctatgctaaaaatacaaaaattagctgggcatggtggtgccccaacctgggcaacagagcggctacagagccagactctgtttcgaaaaataaataaataaaaggaggcaaagggattatgtttttctagatggatcttctttctcttaatctagctgctcttgaatagcaaagtatgggaggaacacacttatgaagaatagcgttgctttgactttttaagaaacactagtaagcaggatgggcgcggtggctcacgcctgtaatcccagcactttgggaggccgacgcgggcggatcacgaggtcaggagatcgagagcatcctggctaacacggtgaaaccccatctctactaaacatacaaaaaaattagccgggcgtggtggtgggcgcctgttgtcccagctactcaggaggctgaggcaggagaatggcgtgaacgtgggaggcagaggttgcagtgagccagagatcacgccactgcacaccagcctgggcaacagagcgagactctctcaaaaaaacaaacaaacaagcaaaaatgctagtaagctacctctgcactgtcaatgagacacccccagaaaacaaagcgtgtggttttgctttggtgaccttcacaccacgcacaatatcggggttgccgtcatctcttcggcatcggggggcctgtttcactttttgtcttgtttttaccctccggagagaggtgttgtgtgtgtgtgtacccgtgttatacacgctcacataaaagtcagccagcatgatgataatagctgatactgcgtgagtgctaacgagggaacaggcgctgtgcggggtgtcttcttttcacgatctcgctgggtcttgttaacaatctcagttaaagcacttaccgtcattactgaagagactgaagctcagagaggttcaatacgtcgtgacaccaggccgtgaaccgggtctgttctgtctctagaacccacatcctgacctaaagcattgtgctttgcatccggagcagcagcctcgtggacaccggccccgtgaagctattgctgatgtgaacagtcttgagtgatgcggctgcctgaggggcaccaaagcctccccggctgctcctctgatcattttattcctatcagggtttggggcttgggccctgaatccaaacagaactttccctttacaagtcttcctgtactttcctccccccatcctccttagtttccattgctgaaaggctgatgtcattaacacagcccctcctgaggcaggtgggtgtccctggccaaccccaaggctttctcccagtctctaagctgtagccctgcccagaggaaggaagagccccaggaccttgtcaggagcaattctcagctttttactggggatgttatagatgaggctttatctctggtgtccctggacggtgctgataacccaggtcatgttcctgtctccccgaagtaaccggagacatcttgcaccatgaacaaaccgggatgacgtgcccgggtttccacctggggatccatctttgtgtctgcaccacggaggccccgaataaagtgaggtcatagctcatctaggtgaaacttgttctgcttgatgtaacgggaggaggggagaaaatgaagctggactggccaaagatcaggctgagaaattcctgggcacagtctggagagccactccaattacacctgtccctccattttcatgggggattggccccaggacccctggcagataccagaatcccaggacgcccaagtctcttatataaggtgctgtaatagttacatgtaacctaatcacgtctcccatagactttatttaaaaaaattttttttaatggagacagtgtcttgctatgttgcccaggctggtcttgaactcctggcttcaagcgatcgtccgaaagtgttgggattacaggcgtgagtcaccatgcctgcccccgacccccgtgtactttaacttatctctaggttatttttaatacctaatacattgcaaatgctatgtggttgttatgctgtattatttgtattttttatttttgtggtgtttttttttaattgttttcctcccaaatatttttgatctgtggttggttgaatctgagggtgcccttggatagggatagtgtggcttccagccaggtagagaaggccaactataaaactttgtaaagagctctatggttgcagcacaccaacatggcacatgtatacatatgtaacagacctgcacgttgtgcacatgtaccctaaaatttaaagtataataaaaaaaaaaagaaaaaagagctctattatatgcatacaaaaaaagctggaaaatgctaattggggtggtgtattttatgggtcacattttactcttttattgtctaaaagtttttaaaattctggctttatgacttatatgacagaaaaaaaaaactgaataaacttatagttttaaaaaattggccaggtgctgtggctcacacctgtaatcccaccactttgggcagctgaggtgggtggatcacctgaggtcaggagttcaactgaggtcagcctggccaacatggtgaaaccctgtctctactgaaaatgcaaaaattagccgggcgtggtggcgggcgtctgtaatcctagctacttgggaggctgaggcaggagaattgcttgaacccgggagggggaggctgcggtgagagtccgtctctcccttccacccccaaaaatatcccaccagctacagtgagctgtgattgcaccactgcactccagctggggaacagagcaagatcctgtttcaaaaaaaccagaaaacaaaaaccccaacagcctgtatgttttgtaccttccgtgtggcctcttggtggtctatgacatgggtacagatgagcccctgccagtgtgttaattgcagcgtggcttctgagccagcagcccgggtgatcttcctagccgggccctggctcactgcctctgtttcccccagtcttccctggcacctgcagagccagagagaggttttgttttccagaaccaggcattcgtgaccctgaccactcccgagcaaagttttcacaccttccccggccccctcagaggaatgaaggtctgggaggagatagggcctcgtccttggaaccaggcacctctttttttttttttcgagtcagagtcccgctctgttgcccaggctggagtgcaatggcaccgtctcggctcactgcaacctctgcctcccaggttcaaacgattcttctacctcagcctcccaagtagctgggattggccaggcgcggtagctcacgcctgtaatcccagcactttgggaggctgaggcgggcggatcccaagttcaggagatcataaccatcctggctaacacggtgaaacccacctctattaaaaaaaaaaaaatttgccaggtgtggtggtgggcaactgtagtcccaggtactggagaggctgaggcaggagaatggcgtgaacccgggaggcggagcttgcagtgagccgagatggcatcactacactccagcctgggcaacagagcgagactccatctcaaaaacaaaaacaaaaaaccaagtagctgggatcacaggtgtacaccgccacgcctggttaatattgtatttttagtagagatggggtttcaccatgaggccaggctggtctcgaactcctgatctcaggtgatccacccgcctcagcctcccaaagtgctgggattataggtttgagccactgtgcctggccggaaccaggcagctttgattgcagaatcaggcagaggccaggtgggaagttgccgtctgttggtgtctcaggccaagctctccttgtccagacagaacctcttcctttttggtcctgaaagtcacactaaaaatcagcagcagctcggccttgggcaacgtgccacgtgtaccgacgttggggttagtggtctttgcaggaagtcgaggttgtttgtgggcctggaaggaaatgtggcctgcctgcatgtacagcctcatgtgtggcctctgggagggggagcagacagaacccgcagccccagagactgggaggcttctctgtggcagcttcctcatttctggttagttgtggcagggggcagatacagtctcttttgcaaaagcagctcctttatgtccagaaggcgacagctcagctctcctttagggcccccaaagaactaacccacagcgtggggctgcggccagccgggcgcagcagcagcggcagtgttcctgtctcagctgcctgcagcatggctttgatctgacagtcagcagggtgtatttgcccccaaagccagtggtctgaggagcccagctccagttaggtcttaggtggggacaccatagatactgctctctggggaaaaccaagtcacggtctggtttgggtgagcgctgatcttccctccagtgtgatcccaagctccctgggatgttggctatagggagcaatcaggagccactccccaagactcaggggaccagcctggggtccaggaaagaagacttcccagcaccctccccctctctgctggtggtctggcactcccctcatgtgacaggcatgtggcttttgggaggaaagaatctttcacaatcagacagaaacagcaactgggaaaataactcatgcaggggtttgggcaatgagtgtctagaaggctgtgggccacgagaaggggattagggtgaggtttcatcagagctgtggctaagatccgaggaggctcctagagctcaaggcttcagaatgaccggtcaggagccagagggatggtgtctttctctctccaacctctcagaccaaaaatggggcatggggctgaccctgcccaatttttttcaaacccgcagagacagaggtttgaaatcattcactccagcattaagtggaggtggctccagctcagagcctccagccaaaccctccctgcgccacagcaggagatcacggcctgtttcccagaggctctgaaataggagtgactctccttaaagtgctccttgcaatgctcatccgagcctgggccaggcagggctgggggctgccttgaagaaagagatgcccccgagatccgataccctctggagcgttgcaggatgcgtctgtccaggaggcactgcaggggagccggggttcccggagcatttgggaaggtttctgagcagcacagggtccttccttaggaaggcggatcttggccgggtgcggtggctcacgcctgtcatcccagcactttgggaggccgaggcggatggatcacgaggtcaggagattgagaccatcctggctaacacggtgaaaccccatctctactaaaaatacaaaaaattagccgggcacggtggtgggcgcctgtagtcccagctactcgggaggctgaggcaggagaatggcatgaacccgggaggcggagcttgcggtgagccaggatcgcgccactgcactccagcctgggcgacagagcaagactccgtctcaaaaaaaaaaaaaaaaggaaggttggatctcctgtagcttcctgtggtgccgtcttctcccagggactcgagccttgttcagagcactgacaggatttttcagaaagttctgtgtgtgtggctgctctttggtaagcccagggcaacagagtcatcaacatttagggagggggtgggtgaggcaggatgtagagttaatacccagttttgtcctatgttcctctgagaagttagctaagaaatcttttctaaattaaatttaattaattaatttgttttttgggccagagttttcactcttgtcacccaggctggagtgcagtggtgtgatgtcagctcactgtgacctccacctcctgggttcaagtgattctcctgcctcagcctcccgagtagctgggattacaggcacgtgccaccatgcccagctaatttttgtatttgtagtagaaagagggtttcgccatgttggccaggctggtcttgaactcctgacctcaggtgatccgcctgcctcggcctcccaaagtgccgggattataggcgtgagccaccgcaccttgcctatttttttttttttttttgagacagaatctcgctctgttgctcaggctggagtgcagtgtcgtgatctcggctcactgcaaccttctccttcttggttcaagcgatcctcgtgcctcagccacctgagtacctgggattacaggcacctgctaccatgcctggctaatttttgtatttttagtagagatggggttttgccatgttgcccaggctcgtctcgcactcctgacctcaagtgatccctgacctcaagtgatctctccccacaatcccaacttgccttcccaaagttctgggattacaggcgtgagccaccgcgccggccaataattttttttttttgagacagagtctcgctctgttgcgcaggctggagtgcagtgacacgatctcggctcactgcaacctttgcctcccgggttcacaccattctcctgcctcagcctcctgtgtagctgggactacaggcgcccaccaccacgcccggctaatttgttgtatttttagtagagacggggtttcaccgtgttagccaggatggtctcgatctcctgacctcgtgatccacccgcctcggcctcccacagtgctgggatgacaggcgtgagccactgcccagccaataattttctttaaaatgctccttacgctacttgctgagcctgggtcaggcagggctgggggctgcctttgggagagagatacaccagagactagttaatcactgtagcagtagaaaacacccttaagggccgggcctgatggctcacgcctgtaatcccagcacttggagaggccaaggtgggaggatcctttgaggccaggacttttttttttttttgagacagtctcattctgtcgcccaggctggagtgctgtggcgcgatctccgctcactgcaagctccgccttccgggttcacgccattctcctgcctcagcctcccgagtagctgggactacaggcgcccgccactgcgcccggctaattttttgtatttttagtagagacggggtttcaccgtgttagccaggatggtctcgatctcctgacctcgtgatccgcccgcctcggcctcccaaagtgctgggattacaggcgtgagccaccgcgcctggcctgaggccaggacttcaagagcagcctgggcaacatagtgaggttctgtctgtacaaaattaaaaaaaaaattagggtcgggcgcggtggctcacacctgtaattccagcactttaggaggccgaggtgggtgaatcacctgagtcaggagttcgagaccagtctggccaacatggcgaaaccctgtctctactaaaaatacaaaatttttagggcatggtggcacatgcctgtaatcccagctactaggggggctgaggcaggaggattgcttgaacccgggaggtggaggttgcagtgagctgagaccgcaccactgcactccagcctgggcaacagagcgagactccatcttaaaaaaaaaaaaattagctgggtgtggtggtgcatgcctgtagtcctagctatgcaagaagttgaggcagggggatggcttgagcctgggaggtcgagactgtagtgagctatgattgcaccactacactccagtctgggcgatagagtgagacttgtctctaaaaaataaagaaggctgggcgaagtgtctcacacctgtaatcccagcactttgggaagacgaggcaggcagatcacctgaggtcaggagttgagaccagcatggccaacatggtgaaacccctctctactaaaaatacaaaacaaaacaaaaaaatagctgggcgtggtggcgtgtacctgtaatcttagctacttgggaggctgaggcaagagaattacttgaacccgggaggcggaggttgcagtgagccaagatcgtgccattgcactccagcctgggcgacagagagagactctgtctcaatcaatcaatcaaaatataaataaataaaaaaaaacaaaggaaacacccttgccaccagagatcctccaggtacaaacctcatgttcaaggagaaatcaaaagacccaggagcttgtcagatttcagtagaggagaaagaggatggaaattcatctttgtgtcttccttcctctgccacttcccctggagagtaagctttaagagctgcagtggccaggcgcggggctcacgcctgttatcccagcactttgagaggccaaggtgggcagatcacgaggtcaggagatcaaaaccatcctggctaacacggtgaaaccccgtctctattaaaaatacaaaaaaaaaattagctgggcgtggtggcgggtgcctgtagtcccagttattcaggaggctgaggcaggtgaatcgcttcaacctgggaggcggaggatgcagtgagccgagattgtgccactgcactccacactccagcctgggggacagagggagactctatctcaaacataaaaacacacaaacaaaaagggctgcactgatgtgcttgaattagcgtcagttgccagtactccctggcgtgctggaaaccgagctcttcctgagtgaatgtcgggcggcatctggtcaggatgctttcctgaagcttcaggactggtggccaggtacaattgctctggaccgagccagacccgagtgagaacttggctctgtcactcactagcagtgtgaacttgagcctcttctgtaaagcgggcgtggtgactgtggcttccacatagagaggctgcttgcgaagagtgaaggttacgtgcttaacagggtgcctagaacgtaaatactggcgatgctcgggacacgtcggccgaagggcgttcagcaaactcgccgggagagcgggggagtcctgaatccttgtgggtattgagggggagggggtgtcccagaaaggcttctctataaggtggatctaagaaaagctgctaattctgttgttttcctgaattcatgctgaggccacacgttagattagtagcagtttctatattcgcccccagttcccaaaagaaccttctccacagtcatccattctagctcttcgctccatttccacgtctgcctctgtgcaagtttttgttttgttttgttttttgttttgagatagagtttcgctctttttgctcaggctggagtgcaatggcgcaatctcggctcactacagcctccgcctcctgggttcaagggattctcctgcctcagcctccccagtagctgggattacaggcgcccgccaccacaccccactaattttctatttttagtagagagggggtttcaccatattggtcaggctgctctcaaactcccaacctcaggtgatccacctgcctcagcctcccaaagtgctgggattataggtgccttccaccacgcccagctatttttttgtatttttagtagagacggggtttcaccatgttggccaggctggtcttgaactcgtggcctcgggtgatcctcctgcctcggcctcccaaagtgctggaattacaggtgccttccaccatgcccagctaattttttgtatttttagcagagacgggatttcaccatgttggccaggctggtcttgaactcgtggcctcaggtgatccgcccacctcggcctcccagaatgctgggattacaggtgtgagcccccgtgcccagctcacattctttctagaagcttttagtcatcagctcagtttgaagtggtacctccctcctgccccctccataactcactgtccagaccactgtctgtctttccctctctgtgatttctgggcatgtctgaagtctattatcataagcagcctgggaaaaggaactctggtttatacagtagggctcagggaatattcagtgaaataataagtaacttttctgcagggcgccgtggctcatgcctgtaatcccagcactttgggaggatgaggcaggaggattgcttgagcctacgagttcgagaccagcctgggtaacatagtgagactctggctctacaaaataataataataataacttttctagccctgaaaacccattaaacttcctggaatataggaactgaagggcgggaaacaggaaagtttcccccttcctttatcagctactgcctgggacttacatctcttcgtgtcgaggtgagaacatcaagggacagacagggaaaggcagttcttcagagtcacacagcaagttagtggcagaaccagcagctggattcaggctgtgctcggtcgagcgctctttccctcctgttggagaaaggcagcagagtgttgaggggctcatgtgtggctcctggagcggtcgtgtggcacggtgacaatgaagtgatttaatacatgcagagtcctgacggcagcctgggcgcaggtagcaggtgcaagtgtttgctgcctcgtttctatgttaccctctgttcttcttccacacccctactgctttcaacaggcccctcatttcaggagacagaagaaccctgacactattgaatatgtcagaacaggccaggtgctcacgcctggagtcccagcactttgggaggccaaggcaggtggatcacctgaggtcaggagttcgagaccagcctgaccaacatggagaaaccccgtttctactaaaaatacaaaattgctgggcatggtggcgggcgcctgtagtcccagctactcgggaggctgagacaggagaatcgcttgaacccgggaggtggaggttgcagtgagctgagattgcgccactgcactccagcctgggcaacagagggagactctgtctcaaaaaaaaaaaaaaaaaaaaagaaaagaaaaatgctggaacatccagaacatcgttactaggcgggggtgagaagctggtgagaagctggcaggaagcttggcgggaggctggcgggaagctggcagaccaaccgccgtctgctggggtggctttctggatctttacaaactcgaggcccgagaaccggatcttgatttgacattggttgttttgtttatttctttgttttggtgacgggaacatggaaaggagcctctcccctgggcacaggcccccagcagacctggagtctggtgtcgcactgtatagcgccctcgggccggcgtggtggttaccatggcccagcgcaatctgcagccgcagaagtcgtgcccaagccctgtctgtcaggccctgcagactcgctcaggccagccccttgggagcgtgagggcccagaatccatttctatcatatttctcccatcattgaactgaaagccagattttccatctgtctggttggaggttcatcaaagtcattcctgggagctggtgactcacagcttcgcctgcagcgccgtggggcagaggggttgagcataccgtgagcaaccagcatcttctttctcggaatcccagcagacggcgagagcagacgggacgggcacccacctagaaactgctttcttcccagggaagagctactgtttacctccctccccgaaacataagtttttttgtgtgtgtttttttgagatggagcctcactctcttgcccaggctggagtgcagtggcacgatctcagctcactgcaacctccacttccgccttctgggttcaagcgattctcctgcctcagtctcctgagtaggtgggattacaggcacccaccaccacgcctggctaatttttgtaattttagtagagacggggtttcaccttgttggccaggctggtctcgaactcctgacctcaggtgatccacccgcctcggcctcccaaagtgctgggattacaggcgtgagccaccgtgcctggcctaaaaacaagttttattgcaaatttgggacaggcctcggagaaggactctgagaactgagaccgaagttcccttagtgggctgaaccatttctgggtttctatgccgtttccatgttggagcctgattggatagaaaggagtacagcctccaatactggctgctgaacaagggaaccctgtgcactggggaattttcagttagggttttttgtgagcagttagagaattaattggaacagcaattctcccaccccaaatcccatcctaggggccatttgttctttctttgcatctttccagagagggtggtcattctcgacgcgacgtctcaaccagccaaacagttcttttccagctggtggaggtgggctgggtggaacacctgtactgcctcattccaggctctttgtgaccaggaatatgcttggtcattcattcattcacacttgctcattcattcactgaaactatttgtgcaaggtcctggggttacagtgaataacagatgtggttcctatcctccaagagacctcagtctagcaggagagacaggcattgaacgtttacaagagtcctgagcattcagaagcagggaacgacgcaggccttcctggtctggtgggtcgggaaagctccctggaagacaagatacttaagttaagaccagaagggagagtaggagttacccaggcagagtgggggtagagcgtttttgccagcgatgtcaacctatgcaaaagttccaaggcaggaaaaagtagaagagagcaaggagcagaatgtgccagatgaagctgaaaggggtgcagaggcccggccacaggttccttaggccaccaaaaggatgtgcgggtctctatcccgacagcagtgactcgggagactgaggcgggagaatcacttgaactcggaggcggaggtttcagtgagccgagattgcaccattgcactccagcctgggggacaagaacgagactctgtctaaaaaaaaaaaaaaaaaggaagccatagacaggtcttagtaagagaggaatgacatgctacatgtgttttaggatgtcttagagcaagccttcagttgctgttagacactgggaaactctttcctctaattgatcttcatatctttgatgtcagtctcgtgagcctgggactgctccaaccaacggacccagccaaaacgtggccactgtggccggagtctcacccttcttcactctcctttcgggagaacacgagtcatgtgtgctagtttctcgtgccagctcctggcaccggactgtgtgttcatgagactgagctgaccagctcaggacaaggtgccaagagcttggggaagaggaaattaggagtcacgaggtttcacgatcagaacccgaaagtgctttatggaaaatttgcatgtcctgggtgcagctcagcctaagagaagctggtgcagtgatttcaggggtgtgtgtgcctggcttctgggaggggcagccagaggcaccggcttcccttgtgaaggcagctgggtcagactgccccctccatccacccctacgtttatgaaggcgaaatttagtaggaaggacatccaaagcagtgtgatggggaaagaggaccagctgggggtgagatgggaactcgccatccgccatcctgttttccccaaccaggtagagttctcaacgctcttggcacttacaacagatgttctgtagggcaagtcctgtaggacattttaagatttctggcttctgcctactgaaggctagtagcgacccctagttattgtgacctctttttttttttttttgagacggagtctccctctgtcacccaggctggagtacagtggtgcgatcttggttcactgcaagctccgcctcccaggttcaagcgattctcctgcctcagcctcctgagtagctgggactacaggcgcccgccaccatgcccagatgattttttgtatttttagtagagacggagtttcaccgtgttagccaggatggtctcaaattcctgacctagtgatctgcccgcctcggcctcccaaagtgctgggattacaggcataagccactgcagctggcctattgtgacctctttaaatgctcccacacattgttatttttatttacttatttgtttttttgagacagggtctcgctctgtctcccaggctggggtgttagtggtacgatctcagttcactgcagcctcgatctcaagtgattttccggcttcagcctcttgagtagctgggactacagatgcccgccaccatgtccggctaattttgtgtttttaatagagacagggtttcaccacatgagccaggctggtctggaactcctgacctcaagtgatccgcctgccttggcctcccaaagtgctgggattacaggtgtgagcctctgtgcccggcccaatttgataatattttatttatttatttatttattttgagagggagcctcactctgtcgcacccagattggagtgcggtggcatgatctcggctcactgcaacctccgccacccaggttcaagtgattctcctgcctcagcctcccgagtagctgggattacaggcacccaccaccatgcccggctactttttgtatttttttaaagtagagatggggttacaccatattggccaggctggtctcgaactcctgacctcagctgatccgcccacactggcctcccaaagtgctgggattacaggtgtgagctgccacacccggcccatttgaggatattttagtgaaggttttgtccggcgggatgatcattctccccatgtcactcctgggggcttctgctctctccttcccagacggagctcctcctgactcccccagctgtgttcccaacagcagcctgcagccctgtgtccaagctggagatttttgtccaggcacttgcgggccgcttggctggaagcctctggtggccgaggtgctgctgtgcggccgccagatggcgctggggagcccccactctctgccgcaggacgggcagaggcaggactggactgcagagggaacttgccttgaagaggcctggtccttaaagagacacagcacacacggcccgaccggcagccccagagcagaggctccactgatggcaggcgcccctggctaggctctgaggttcctttgccctcgccttgctgaatggtgagccgctgcctctcggagcccgtctccttgacagcctgccctcggctcctgcagccactcctgggcctgatggggacagggccagcctggtgggtggtgtcagaggtcctggcagagcagcgtaggcctgggatgcgtctgcagaattctggctgaacgagcgaggagcacggccagcttcggggccgtcgtgaccacaggagggcagagggccagcccgtgagctctgaccccagctggacgtgctcttgtttcccttggggctaaggagattggagccactgaactgaatctctgggttttggagacttagagaatccattggactcttctgctggcgtctttctgaatgctgatggggacttggtggtaagtaaatgagtagggggctccaggccctgctgtcgagccctcggacggaccctttgggaaaactctgctgttgacctgtgggtggtgtcatctgagccatgtcaggtgagggccacgtgagctggggcttggcgagagaccctcctaaaacggtggctcggggagtgcataatctaagccagcggctctgcccaggatgctgcccttgctgtggcccctggccatgggaacggggcttcaactcggcccctgggaagtgtgtgggggcgtgtggggagtgtcacagctgcaaggacctgatgtcactgtgctttatcctgcagtgatgcctagggaggcagtgagggggtgaatgcagctccccggggagcaggtccacatcttgccagggcagcaggtcttcccatgactcaagctgacacaaaagtttggtgcagaaatgactaactgggaagggcttccagttcacctctgttgcctgtagatctcactggctgctggaaaagccgggaggctgagcagagggcaggtgagaagagggcaaaagacagactcataggctgagacttcacccttacaggtgacactgtggaggcctggggaattttcttctttccccagactggagggctgaggatgaatcttagaatagtaaatgctggccgcacatggtggctcacgcctgtaatcccagcactttgggaggtggaggcgggcggatcacctgaggttgggagttcgagaccagcctggccaacatggcgaaaccccatttctactaaaaatacaaaaaattggccaggtgtggtggcgggctcctgtaatcctagctactcgggaggctgaggcaggagaatcgcttgaacccaggaggcagaggttgcagtgagccgagatcctgccactgcactccagccaggcaataagagtgaaactccatctcaaaagaaagaaaaaaaagaatagtaaatgctgctttactgtaccaaggaaatgggaatagagcaaagcacggaaaacaggccaccccaggatctgacaggagagtttgtattctgctagtgctcataggaggcctggaggtcgtcttcttgatccacctgggcacataccttcttttttttttttttttttttttttttatttctttctgagacggagtctcactctgtcacccaggctggagtgcagtggcacgatctcggctcactgcaacctccacctcccaggttcaagcgattctcctgcctcagtctcccgagtagctgggattacaggtgcccgccaccacgcccagctaatttttgtatttttagtagagacggggtttcaccatgttggccaggctggtctcgaactcctgacctcaggtgacccgctggcctcggcctcccaaagtgctgggattacaggcgtgagccactgtgcctggccctgggcgcatactgtctacagatgtgaacactgaggctggaaactcttgagattggccggaggcattgaagaagtggggtttggccgggactggcatttgggagattgtcactggactttgttcagcttgtctccagggtcatctggcctgctgtagtagatatggttttcttgggataccagttctctttctactttatcatcagtggccctgggagggttctgaaataacgctgcctgcctccctcgtgtagctccgatttcttcctccctgagtttaacttcattctgtttattcattcattcactaattgccgctcaatgcagagattacacacgggaaccctggattcagacttggttcatttccaagcatcgccatctgctagttagccaatggcttagcctctctgcacctcaatttcttcttctgtgaaatggagataatagtaaattggcttattgtaaggattacgtgaaataacctacgtaaagcagatagagcagtgcctgacacttaagaagcactcagtagaccaggcacggtggctcacatctataatcccagcactttgggagggtgaggcaggaggatcagcttgaacccaggagttcaaggctgcagtgagctgtgagaatgcccactgcactccagactgggtgacagagcaagactctgtctcaaaaaaaaaaaagcactcaataactgttagctgtcattaattttatttgttcaatgtgcattattgaatgccgatctgctgggcgctcggcagaaagctgatctggaggcaccatgtggtcatagctgtgctgggagtctacctgagccttgttcacccactgcgctgagcactgggtctgcccagtgaggaagatgcagtcctggtttttttattttttatttttgagacggagtcttgctctgtccccaggctggagtgcagtggcgtgatctcagctcactgcaagctccacctcccaggttcacaccattctctcgcctcagcctcccgagtagctgggactacaggcgcccgccaccatgcccagctaatgttttgtatatttagtagggacggggtttccccgtgttagccaggatcgtctcgatctcctgacttcgtgatccacccacctcggcctcccagagtactgggattacaggcgtgagcaactgtgcccggctctggcttttttttttttgagagggagtctcactctgttgcccaggctggagtgcagtgacaggatctcggctcactgctgggattacaggcacatgcaccacgcctggctaatttttgtgtttttagtagagacggggtttcaccatgctggccaggatggtctcgaactcccagactcaggctatctgcccatctcggcctcccaaagtgctgggattacaggcatgagccaccgcgcctggccagtcccagcttttaaggacctgatgggccagtgagggtgcaaactctcggttttttggtcatcacagtctatttttggttttggtttttcatttgaatgtagagggccccactccctcccacccactgtgtattcagcctctgcacgcaccggggctccctgcctggcccccgcatgggaacatatttttgtcatcagcggtgacctctgggtgatcaaggaagcagagactcctggggccttcctgtcgtgtgcagtggagctgagctgctaacatgagaagggaggaaatgtggagatacccagttttggttctagggcccgtccccttttttctgtcctggccaagaaccaaggcttctaccttgattggtagaagcaagagttggtcgttggagaggccgtgagtagcacgtgcttgggaattaggagcagggcaaatagccttgaaaatgggatgtaccttcttcccactcagcccctcgtcattaacccagtgctcctggcggtgcacccaaccatgaaatcccctttaagtccagtgatgaggcaggagcaggcaggtcaccctggggttggagagccgcagacagtctgagtgcacaggctggagggagggctgggagggtggagagcactggccccagggactgtctggggaatgcttagaaggggcctggaggaggcagcgtgatagatgggggttcagtgccttggggagcactggctggtccccacccggtccacatttagctgaatcaggaaggtctgtctgccacagctccccgctcctctgacagattggggttgatcgctggggttagagcacttcagggtagcatcacctttggcaaagcccggaggagaaggactctttaactccttccttcccagcgcgtgacgttggatctccccaactcctcagtgccagggatgcggaggtttctgttcccacccaaatcactgtggtgctcaaaggctcacacacttgtctctgtggccaaggttagcatctggccgtggtgttaacatctactggaagccatccaacaaaggcatcaagggaatctcgaagtgactgccctttcctgagacacgttgtctgagacagacgtctggagatggaagagggttgacagggtttcccagagggtggtctctaaccccatggacccgcagagatttctcaggaccttcagcacccggtgatcaccagttagctggccgtggaggcagtatgcgtggtgtttaagagcatgaacaggccgggcgcggtggctcacgcctgtaatcccagcactttgggaggccgaggcgggcggatcacgaggtcaggagatcaagatcatcctggctaacaaggtgaaaccccgtctctactaaaaatacaaaaattagccaggcgtggtggcacgtgcctgtagtcccagctactcgggaggctgaggcaagagaatggcgtgaacccgggaggcggagcttgcagtgagccgagattgtgccactgcactccagcctgggcgacagagcgagactctgtctcaaaaacaaacaaacaaacaaacagaaaaagagcatgaacagagtgccagggttcaagtcccagccctcacttaccctctgagtgggttactcagctgctcagggcctcggttttctgacctggaaaatggagaaaacagagataacagtgacattcacggtgagatcacgctagtgaacgaaacgctaagccgggcacacagtcggtgttctgtgttcgttatcagaagtttcctctgtagagccctcaagatttgtctctccctctaccctctatcgtgttgtggagtggagggtccgagagtgccaggattggacagaatgtagacagaaaaaagcaaactatggcaacgcgaaggaaagcaactgccacattttagcttggaggatgctgaaaatagcttgttcaagcctttgtagataaaaatgtaaaatgtacgcaaatgtatgtgactcacgcagaagcatacatccatagctccctcacagtcagcgccggatgtggccatcaggaaaaccccacagtgtggggagagggcccgagcgttcttgcttgttgttgttttgaggaggggacggtgctgctgcctcctgggctggtggctcctggtggcggcagctcacgcccgtttccacctttcccctgggctgtcttccgagagttccaggtgggaagaagagatgcccttggcccctcatggctcctccggcctcgcggtcctccgagagcctgctcgttcccttcccatgccgaagctctatttctggagcgtctcattggagatgcacgccccctccctgccaagctccaggtgcctgcttggccctcccaatcctgtgtgctagtcagggacggtgggagggtgacagctgcagggaggggcggcaagagacagcgctggtgcctgagccaggaggattggggcggagggagccctggggacgcagggacgggctaataatattgaaaaccacttctgctgcagccacctgtagaggcttccccacccagagcatcatcctgtgcgtctcccaggggctccccagcctgtgatgagtgggtgacccccatctcccctggggcagctgcagaggcctctgcccaagcagcttatggggcttcctctcagcatcctgggggaggagctgcttctccccttaagaactagatgtgtgtgtgtctgtttggagtgatgaggaccgacccccacacccctccagcgttctgcgggtgccgaccacactgcccccggcaaaggccaggctgacttaaccttcctggtaggcctctgtagggctgggctcccagaagttttccccttaagctgcctggggatggggtggggtggagacagctccggtatctgaaatgtcactatctggggtaccgggccccctgggtgggccccactgcttccctttccctgggttcaggaaggggcttcagccccactgccctggacccccctggcctgactcccctcctgtccttccctgctccagggtcgcttggcccaaagaggtctgtggggaagctgccatggctcccacagaatcagcccacaggagacaggcatggggcccccaatctcttcactgcccttgggcgagggggtcttccttagagggaatttcgtctctaaacggtcatttctcaggcctcttgacccgacttcccaccatttctaggtgatgatgcaaacacgatgggctttccaggccgcggctcggggtccccaggaggggtcctggaggggaacgcgtggagcccttggggcttctcctggctccagtttgtcctccgcccaggaggggcacatgtgggactgtcctggccccacagcccccgtgacttcggtcctcccgggtctccacccgcccccctccatgtgtggcgggaacggccgcgctcagaggtcaggggtgtggaaagggacgagcgggggaaggttcgggaggagagaggcgcgtcccgcggcgcgcaggacgttcaccccgtgggtcccgcagcgggtctggctggggaggggcccggccgccgctcccgcccgcgaagccgcgcttggagatcccgggcgggaggtgatgtcacccctgtgggctcccgggccccccacggcacctggtttgcggatcgccaggatcctgctgagcccggcgcgggggggacgagggggacctgggtctgcgccgccgcctggagaccccccgagacccccgcggcccctcctcgcccagcgccggagccccgctgcccccttagcccggccgggggcgtcctgcggagggcggagcctcgagccgattggtccctccccgccccgcccccgcaccaaagccccgcccccgcaccaaagccccgccccaccacgaagccccacccccgccccgccccccgcgaagttgctcatcggttccgggatccgcagctgggctcggcgcggccgctggggccgggagggttcgggagggttttgggggctcccgccccgccctcgcccctgccccggccgccccgcgctcctcccggggacctggttcccggcctcctcgcccctccgcgctcgcaacttcggcctcccccggctcccgcccgctctccctcctttgttgcgcgatgagggtcgggtttcggatctgaccgagccgccgccgcgggatggagccgctcagccaccggggcctgccgcgcctgtcctggatcgacaccctctacagcagtacgtgtgccgggcgggggcgggaccccaggatcgggatcgggaccccaggatggagatcgggaccccaggatcgggatcgggaccccaagatcgggatcgggacccaggcaccgggctggtccggggagcgcgggcgggggcgagatcggggtccggatcggggtcgggttgggaatcgggatcggggtcgggacccaggagccgggctggtctggggggcgcgggcggggggtccccagagaggattcctgcggtccgggggcggggaccgtgggcggaccgagccgagagctgcgtcccccctcccacctgttgtgaacccggcctccgcgagcctcaggggagggaggcccttctgggtgctgcccccgcccctggaccggcagcttctctgtccaggctgaagccgaaaggccgttttgggagcagtcgttggcacccgagtttgccaccccaggggcaccgggtcatgtgtggttcagggcccaggggttcggtgctggggtgggatcgggtgggaggggagacggggggtgcagatatccgcgggggccgtttggatgcgggagctgaaaatcccgggctcagcaatctttcctgccagcctcatcaccacccccaccctcatcatcaccaccaccctcagaagaaaaaaaaaacaaaccttctcgagttctccaccccctcgctcccaaatctctctggatcatgtgattgctcttgcatggccccgggggatgcgtaactgatcacgggtaatggtgtgggggggcttggggcgaaccgagagccgccccccgcccccaccaccgcaccttgctcctgctccgttgctagaaaggcaccgccccttctccccacccttccctgagacacctttcccgaaagctctcagggattaggaagagggtcctcctgggcttacatagtggatttcgcccttcctggcccacgtgagtgggaccctcccactctctcagcacatctcccaggcaggagttgggggaggcacgtggggccacgtggagcctggttcagcctgattctaggcactggatgccatggaacaggagcgttttctttctttttttttttttttgagacggagtctcggctctgtcgcccaggctggagtgcagtggcgcaatctccgctcattgcaacctctgcctcccgggttcaagtgattctcccgcctcagcctcctgagtagctgggattacaggtacccaccaccactctcggctaattttttgtatttttagtagagatggggtttcaccatgaggccaggctggtctcaaactcctgacctcaggtgatccacctgcctcagcctcccaaagtgctgggattacaggcgtgagccaacaagggcatttgtaagggtcatcccagctagagttccttgataagtcatatggggggggtggggggagtagagaagggtgatgccttgagccccaaagccttactctggaggctgtgtggtacccaacattcaacctctgacctcagcatccccttgggtccaggtcattccctgtatcttcttctccacccgcctcctcctccatccatgttccttcctctcctccccccaggagctgtccttgtgatggttcattctgctttggtttctcaacatcaaaggggcaaagccggatcccctgggcataggtcctgtgccaggtgccgccgctccatctgctccttcccctgcagaggccagcgtcgttgggtgaaggtcagggcccatggctgtgtggcatgtgcgtgcacgtgcgtctgcatgaatgggggcacacatctgttcggagcgcagatgcagatcagctcctgacccggaggcaggattagtggccctctcttagctgtgtgcttgcaaacagccgtcataacaatgcctcagattcacgcgtgcttatgttcctgagtgtttctggctctttgcaaaacccagttcttgtttccctatttcccgaagcctggaatcgtatggaaccctgtctctagctttctctgcagcagaagactcctctgagctgatcatttccaagtcttccataccccaccctcttcctcccacgcctggagcaaaaaagcaaaattgcctgaggccaccttgaaaattcctgaccagaggaatgccagaaaagggaattaggccaaggcctcttagggggttctgttgggcagccctgattcaggcagattggcacctgagctgtctaccctcctgctgctgccctggcctctgggcggctcctggggtggcctggatggtgggtgggagggggcactgatgtggccgcagtgtgaggagtccctgcctccctcttcggaacagcttagtggagagctgtagcaggaggcttcccggggaggtgctgtgcagtcatgtttgggctgttagccatcaactttcctcttgacaagagcctaaattaaaacaaatacccgagctgtcatttgcctggcagcaaggttttgtggctcccagaggaagttcctctgcttctcaggaagctgtttgcttacaaggctcacagtcctggggtgacaaatctccacaaatgccagatccatcgggaactgtaaagggggtatacccagggcacagggtggcagtgtgacttagagatgggaatgactcggtgttagaggttccctgccttcctctctctgagcattgttcctggtaacaatgataatagcgtctcctgagcacctactgtatggcaggcactgggatagtcactttctctttctttcttttttcttttttttttttgttttttgttttttgttttgttttgagacggggtctccgtctttgcccaggctggagtgcagtggtgcgatcttggctcactgcaacctccacctcctggattcaagcagttcccctgcctcagcctcctgagtagctgggattatgggcgcctgccaccacaacccagctaagttttgtatttttagtagagatggggtttcaccatattggtcaggctggtctcgaactcctgacctcaggtgatcttcccaccttggcctcccaaagtgctgggattactggcgtgagccactgcgcccggcctgtgctaggcactttctatccattctctccaaatctcacaactctgcaactcttacagagtaggaaagtgaggctcagttagcataaatcatagacctaagatcacataagtaacaaatggctgagctggaattcaggttgtaccctagaataatgaggaggatcccgagtaccacctgggtatgtctgagtttattcaaggtcttgggatgtcacggaatgggggacgccattctctatggtcctctgttgcagagttctccctgaaacggtccagcagggtaaatggcttcaatggctctgaccccaacctggccctgtgcctcttgcaggacctgggggctgggcctggagcccaggcagggacagctgaggctgtctgaacccactgaggctggtggctctctgctcctaaggtgccagcctgccagccagcccctcccctcacacacttcttttttttttttgacacggagtctcgctctttcacccaggctggagctggagtgcagtggcactatctcagctcgctgcaagctccacctcccaggttcacgccattctcctgcctcagcctcccgagtagctgggactgcaggcgcccgccaccacgcccggctaattttttgtgtttttagtagagacggggtttcaccgtgttggccaggatggtctcgatctcctgacctcgtgatccacccgcctcggcctcccaaagtgctgggattacaggcgtgagccaccgcgcccggccctgaacacacttcctgcctttggggttggcagttcattctttctggttttgacaggaggagtgtgcccacttccatcacaggtttggtggtcatttgatgagggttgggcagcaaaccctccatctctcctatggtagaagtcctgaagggctgcggtaagtgtgatttgtctgcctcaaggagaagagttggatcccagctgccaggggccctggggctgatgggagcagagtcctttccctgtggagtgacagatggtttcagacatcccccagttcttgtgtctgcgccactcatttgcctgtattaatgtagcaatgtcagtttcacccctcagtaccttacctttctctccctggggttgctatgatgctctctctgaggctctcttttttttgagacagagtctcgctctctcgcccaggctggagtgcggcggtgcgatctcggctcactgcaacctccgcctccccggttcaagcgattctcctgcctcagcctcctgagtagctgggattacaggtgcccgccaccacacccggctaatttttatatttttagtagagacggggtttcaccatgttggccaggctggcctccaactcctgacctcaggtgatccacccgcctcggcttcccaaagtgctgggatgacaggcgtgagcccctgcgcccggccatgttttcttggtcataatgcctctaggtctttaatcaccctttctgctaaacacgtatcatcttctctttgttatttttttattttatttttttatttttattttcccaatcccatgggattagattggattaaatgggagcggagtagcccaaaatgggggtggaggtgtgctctgacactttcttggtccctgggattctccaagcagatctggatcaagacatacgtgtgccccaggcaggttgatcatctggcacctcttcaactggaaaatctttatatgtgtgtttaggacttacttagaggagaggcagaggctgtatttaaagcctctccctttgccacttcggcctccatttggtcccaagtaatttagtcctggtgtcaaacataccttccctgctgagccaagcaagagcctgcagtggcttggccgtcatggaaggcagaacgtgaccatctgttgttactagagcctgctttttggagctcacttctcttaccccaagcaacatttccaagggcgatttcattctcttgtgatattttcatgccctttatagattcagtgccccatctatgggccaggaaagtatttggagcagtggagatgtaagcctgtctccaggtgagcatgagcctacctcagtttctcatctgagccccacattctctacaccagggaccaagccactggtctgacagcctgtgtgcgtttgatcagagcagttcagttctcggggccgcatcagacccctccgtgtgtgctagtgagcgcctgctggcagatgcttgcttgttttcggaatagcccagtaatttattcctttttgtcaacaccggcccataatcttcatggctgctggagtctcagaggtggggctggcagaagaattaagtcatctactcagagaaacttaggtttctgtggttgtgattgttggctactgttgttcttcgggaaaaggaaggaaatttgtggggaattggctggaagatgctgttaggaggatggaagatggggaatggcggggaggctctgcctcactcttgcgagtaggatggaagacttgttctctgtctgaggtatgatctgctttctgggacaattccggtaccttccttcgtagagggagggcatgatggctctcgtgggtgttgtgtggattaattcatatttataaagtgctttgaaggtgaggagagctattgagcagctcagctgtccagctcattgcgctcctcatccgggaaagcctcgagggactgggagaggccggcacaggacttaggaaggggcagggaatgtggcaggaggaccggcaggaacagggtatcagaccagctctgaggcagcgcctcccacagcggctcccgcacaggccctccataggtgttggttgtctgagtacgggtgggaaaaagaaaactcgagttcttggctccttgagctcctccccgcagcagaaacccctgttagctgaaacctgtcagctggcccgtccatgcgtttccggctgtgtggatttggtcattgtactcgctcgtagtggagtcagagacccccaaagggagtctcgcgcttttgccagggtttatgattggaggacttcactgccagcgttggcggcagctgtttggctgagcttgagccctttgggcgcaaacctagggcaggcggcttcaagacaaccctgcgcccactgcccctgccaggcccttggtggtggcgggtgttggtgatgtgtggggggtgggctgaggtgatgtgttgagtggactgaggtgatgtgttgggtgggctgaggtgatggggggggtggactgaggtgatgtgttgggtgggctgaggtgatgtgttgggtgggctgaggtgatgtgttgggtgggctgaggtgatgtgttgagtggactgaggtgatgtgttgcgttgactgaggtgatgtgttgggtggactgaggtgatgtgtggggggtggactgaggtgatgtgtggggggtggactgaggtgatgtgttgggtgggctgagatgatggggggggtggactgaggtgatgtgttgggtggactgaggtgatgtgttgggtgggctgaggtgatgtgttgggtggactgaggtgatgtgttgggtggactgaggtgatgtgttgggtgggctgaggtgatggggggggtggattacctgctctgttctatattcttggcacttttctccaagtgactgtttgtaccagggggagagttctgcagctcacccatctctggggctgtgataggggaggctgtttgtgacatgtgaccttggcttgtccccacatgtgagaaagtccattgctgctgtggggagtagcttgcttttcttttcttttttttttgagatggagtcttgctctgtcacccaggctggagtgcagtggggcaatctcggctccactgcaacctccacctcctgggttcaagcgattctcctgcctcagcctcctgagtagctgggattacaggcatgtgccaccacacccagctaatttttgtatttttagtagagacggggtttcaccatgttggccaggatggtctcgatctcgtgacctcgtgatccacccatctcggcctcccaaagtgctgggatgacaggtgtgagccaccgtgcccggcccaggagtagcttgcatttcttagggcaagatatggtcagttggggacatgacgctgctgggagcagcgggaatgttccactggtccctgaagcttgaggagaacctgacccagagaccttgtgaagggggaaggagaaagaaatcaggccaataggcaggctacggaaggcacccccgtatggaggctgaagataatgcccaatcccacccctgcctgggcatttggcaaagagccctttgaggcgggaccatctgaggccgtggccacttgtggatggagcagcgggttctctgtccccgggtcgagacctgactggggcctctcgcccagttttttgtccaggctttatcctgtgtcctcctcctgcccttccttcctccccacacacactagaccgaaagatgaatctgggtttactggctgtatggaaaatgtcagagtcagcctgggcttcagtagatagagccagatgtggtcggctctgtggtgacctgattgattaatcgggtgccactcccctctttcttcatttttttgagacagattttcactctcgttgcccaggctggagtgcagtggtgcgatctcggctcactgcaacctccgcctcccgggttcaagcagttctcctgcctcagcctcccgagtagctgggattacaggtgctgccaccacgcccggctaattttgtatttttagtagagaagggatttctccatgttgatcaggctggtctcgaactcctgacctcaggtgatccgcccacctcggcctcccaaagtgctgggattacaggcgtgagccaccgtgcctggcctcactcacctccttcttgtccctgccctcacctctgatgccttggtgtgcctctaggtcacaggtggacatggcacacgtgattgggcatcttgcctaaggctagcagggtctccaggaagtcttgggtggctgggaggcctcaggtaaaccagagccaaggaagctcagagtccttgtcactccgggcagcttggctgctggactccccggggcatcggtggagctggtgctgcctagagaagcctggtattgagcagggatctgtgggcttactcggggctgttggggaaggatgtggccatcattaccttcgtgggattgaagggctgcttctgtgagtgttctgggctaaccccttcctcctgggcagcggctcctggtcagcagcaaaggtttaatggatcgagattacggggaccaaagacgccgtgtaattaagccagttatttctctggctgggaacatctactcctcacagccgcaattgacttcgtcacttgtggttaccccgttcgcgttacctcgggcctaaacagcccatacgtcatctttttgagggagtctctcccttggaggcaaagttttaggagaaagatccctctgggagttgtagagtcggcgtggcagtgtgtgctattgaaggtgaagttttaggagagagacccctctgggagttgtggggtcagcgtggcagtgtgtgctatgcaagagtgccccctgcagttgttctgtgcaatggcgcccacgggagcctctttgggaactgtgtctgggttctgtagagggacatagatagaaacctcatccttgggtctcccaggatcctggggtcccgtgaaaagaaagtccatcagtcctgatggattcatagaaactagtttttaatttggtttagaaagaatggaagagacaggccaggcacggtggctcacgcctgtaatcccagcactttgggaggccgaggtgggtggatcacctgaggtcaggagttggagaccagcctgaccaacatgatgaaaccccgtttctactaaaatacaaaaattagccaggcatggtggcaggcacctagaatcccagctactcgggaggctgaggtaggagaattgcttgaatccgggaggcggaggttgtagtgacctgagatcacgctgttgcactccagcctgggcgacagaatgagactccatctcaaaataaataaataaatacataaacaaactaaattaattaattcaaggtcgcagactacaagccagggactgtgcgctcggttggccctgctgtaaactgtgttctttctcccgcactcttacccttcacagcggtgctggtgggggctccttgacgctggtatttcactgaggttgatggatctgggttcatttctctagctagaaagacagttgtgaagactgcgtcttgcccccaagcccccgtgatatgaggagacagccctctgccccaggcatcctggaagcactgggagcatccaccaactgggctgcctcttcctaggggcatgagcctaaggaggtctcctcatgggcacttggagcccacgtgcctgcattgctgtgttcctggaattattggcaagaagtgctgattgttaacatacacaaacacaccccccccccacacacacacacacaaacacaaacacaaacacacccccccatacaaacacaaacacagagaaagggagagtgagaatagactttggcggttgggatggagcagggccagtgcccagtttctagagcgaggccaggggcgaggacgcggggatttggcagagcccaagcgtgctggccctgctctccagccttttaaaatccacctccacatttcaaaaggaaaataaagagagccctcagccataaatcaggccactgagcatcgaggtcctttgccgaggcccagggcctgctgggctgcagagccagctgctgtgtttgaactctcccgcgcgcagcatgttaatgacggggcagaccctccagacccaggctcacacccacgacggccctcgagcccagagagtcccccacggagaggtcagcccctggggaaggcctgtgtctggggggcttacaccttagcggagccccctttggctgggacttcaaatcaagccagacccttctgtagctctggattctggccagatgaaaggtaacccctgacacagatcttttgagcccatttcccaataggaataaaagtaacaaagcaattgattggacacctcacgggtgcaagagtagagcgagcgttctcacattcgtgatctcatttcatcttcacagtaaacctatgaaaggttgttaccctgattttaaggataagaagggggattggccattgttcttggcctctgctggtgacttctgccatggggggcaccctgagggggacgcaccaggtcttctctgccctcctctgctcaccctcttcctgcgtggcggaagctcaggcatcatctggctttgtgagtgcctctgtctagacaaaacccacgtcctccctccctcctctttcccctgcagggccagctttggtgttaatggagcagaaagccttggtagttactttgcgagtgcgtcacggggagggtcatgagagaccagctggcgtccacccagccgcgtggaacagccaccttgacttggtcgaggccagcaagcgtcttgcagaccccgtggcagctcctgacccacgttcccccttgggaggcctggatgagctggggcaccaagtgccatctttgggtgtagaatcttcagaaaccaaaggcaggagctgattcggtctcctgctccctgggaagaaaggatggaacgcacattggctgtcaggagagctgctgcttctagccggaggaccttgctgcagctggtcagctgccagcacagccaggcccttgttgtgggtgcctgccgtgtctgtcctcaagcccctccctgagtgaaggacactgttccctttccaactgcctgtggctgtgctagaccattttctctcctttgcccagaaaccttcagtgggttcagtggggcattgcctttcccaccacattcagtccagactgggggaacctcttgttatccattccagtttcccagcacactgcccattctctagccagtaaggcctctcaccatcctgcaaagctctgtgctccaaggatctaaccagcttcaagcctcagctcagctaccaccatctccaggaagtcctccaggcctgattcgagcactggccttagtgagatccctggctcagagtccctaatgctgattgctccggctcacatcgcttagcactttcttatctttttttttgagacagagtctcgctcttgtcgcccaggctggagtgcaatggtgcaatctccacaacctctgcagtgctcactgcaacttccacctcccgggttccagtgattctcctgcctcagcctcccgagtagctgggattacaggtgtgcgccaccatgcccggctaattttgtatttttagtagagacgggatttctctatattggtcaggctggtctcgaactcccgacctcaggttatctgcccacctcggcctcccaaagtgctgggattacaggcgtgcgccaccacgcccggctaatttttgtatttttagtagagacggggtttcaccatgttggccaggctgctttgaactcctgacctcaagtgatctgtccgcctcggcctcccaaagtgctgggattacaggcgtgagcgacccgcccggccgatatcgtgttgttttatagtgtttacctgcacagtgtttcatgccagttgtcatttcttctctgccagactctcaactccttagaggcacgagggagaataacaaaggcttccgtgataggatgccagacattgtcctctctgctttgctaacagtatctcatttagcctccggcaacctgctgagttcttagccatttttatcctgtttcatgcttccccaagacttcccagaggtcacacaacacatctgtcttgacgcctcagcctgtgttctttgccagaagcgcccaatgccagggcctggggcatgagacctcaggttggggcccaggcctctgcatgtctgaaaagctcctcggcttactccctccgctcgggggaccagcctttcaccatggtggttctcccttccccgcaacacccagctaggcaccgagcaggtggaaccctgggaaatgctgctttgtgattggttggagtcaggggtggctatgaagatgctgctttgtgattggttggagttgggggtggctatgaagagacgaagtgctctagggctctgggtgtctggatccagcactggggatgccccggagagtcctggagcagggaggatccaagcaggaggtggagctgggtgttaggagggcagaagggccatcagaaggggatactggagacatccaactggtggcctctctctccgcccagccagagctcaaggctttgcctcaccccgagaagataaatcactggggtatcacggggtcccccagcccccgtgccatgatggacatgcacattttgatttggcaggtccggagctcagattctgcatttcctttgtttgcttgtttgttgtttttgagacagagtctggctctgtcacccaggctggagtgcagtggcgcgatctcagctctcactgcagcctctgcctcccagttcaagcgattctcctgcctcagcctcccaagtagctgggactacaggcgcgtgccaccatgcccagctaatgtttctgtatttttagtagagacagggttacaccatgttggccaggctggtctcaaactcctgacctcaggtgatccgcccgcctcggcctcccaaagtgctgggattacaggcgtgagcccctgcgcccggcctggattctgcatttctagcaagtcccaggtgaggcccgcgctgcccacactggatgggaaggaccaggcgcctgcagcatctgccctccaagccttcgtagctccctccttcctgcaggataaactctaaactccttagcacaacgtgggagccttctcagagactgggtccaacccatctccagccgcagcctcccctcctggccccactgccacacccccgggcctccggccacactgagcctctcccggtttcccaggatacaacactcgcccattcatagtgtggtgccttttgcacgtgctgttcctctgcttggggatgctgttggtctttctcagccaggtgaagaggacgctgaatgtcacctgcttgagtatcaggaccggggactgggcactggacctagactcttggccctggagagaagccctgcatggggccgcagcctgcccccgtccctgctcacagaaaagctcagccttgcagccgcgtggagtcagacgacttgcctgtcctgctttgaacgtgtggtgttcctaccacctttgagtaaaaatagagctgagaatgaccgaagtgaaactccaccttgggctctgggagagcagaggtgggaccacgctggggagggtgggtgcggacactccgggggcgggggctgaggccatctgcgtgggctctgggagagcggaggtggggaccgcgctggggagggtgggtgcggacactccggggggtgggagctgaggtcatctgcgtgggctctggggagggggccctgtgagccgggccaagctgccaggcactgggggtctacgccctggactcagagagaccatggcaccctcaaggctgctctcacttgaaaattttcgttttggggctggacatggtggcccacgcctgtaatcccagtactttgggaggctgaggcaggaggatcacctgaggtcatgagttcgagaccagcttgcctaacatggtgaaaccccgtctctactaaaatatacaaaaattagctgggcgtggtggtggatgcctgtaatcccagctactcgggaggctgaggcaggagaatcacttgaacccgggaggcggaggttgcagtgagctgagatcacaccattgcactccagcctgggcaacaagagcacaacttcgtctcagaaaaaagaaaaaaagaaagttttcactctgggctgtggaactatttcaggacttcctgaggggtttcctctggagcttcctgagtttcctcctggacattttgtctccaggtcccagcgccaggcaggggtggctcccggaagggctgtgggtgccaccctggctgactgcagccctctcttgcacctcctcccggccatccacccgcaggaggtcttcccccagcactggcttgtgaggagctccctctgcccgggagaaaatggctcctccgggtcacaggctcccctccagggactgaggggcatttttggattgtgggaaggcgctccagggcccggttctgtggccccaggcctgttgctcggctgggtggaggcacctctgcaggccgggagcttggtctttgaacacctgcttagcctatgacctccagcaagttatttatgctctagtgagctgtgtttttctcacctttagaatgggaacaatcttaccaaccacactgaaagcactgctgagtttttcagcaaataaaaataaggatgccccgttaaattagaattttagatgaacaatgaataatttttaaatataagtatatcccatatggctgggcatattgggaggccaggaggatcacttgaggccaggagctcgagaccagcctgggcaacatagagagaacttgtctgtaataaaaatacaaaaaattagctgggagtggtggcagacacctgtagtcccagctcctacggaggctgaggtgggaggatggcttgagctggggaagtcgaggcttcagtgagctgagatcatgcctctgcactccagcctgggcaacagagtgagaccctgtctcaaaaaaagaaaagtaagtatatcccatacaaaacttaggacatagtagactgaaagctagtctgttgctcacccgacgttcatgttcactgggcgtcttgcattttatctgtagaccgaaagcttgtctgttgctcacctgacgttcatgttcactgggagtcttgcagtttatctggggtccctgagtctggattcagtgctgtgtgtgacactttgccagggtcccacctagatgctccgacatccatgttcactgggcgtcttgcagtttatctggggtccctgcgtctggattcagtgctgtgtgtgacactttgccagggtcccacctagatgctccgacatccatgttcactgggcgtcttgcagtttatctggggtccctgcgtctggattcagtgctgtgtgtgacactttgccagggtccgtcctacctagatcctccgacatccatgttcactgggcgtcttgcagtttatctggggcccctgcgtctggattcagtgctgtgtgtgacactttgccagggtcccacctggatgctccgacatccatgttcactgggcgtcttgcagtttatctggggtccctgcgtctggattcagtgctgtgtgtgacactttgccagggtcccacctagatgctccgacatccatgttcactgggcgtcttgcagtttatctggggcccctgcgtctggattcagtgctgtgtgtgacacttcgccagggtcccacctagatgctccgacatccatgttcactgggcgtcttgcagtttatctggggtccctgcgtctggattcagtgctgtgtgtgacactttgccagggtcccacctagatgctccgacatccatgttcactgggcgtcttgcagtttatctggggcccctgcgtctggattcagtgctgtgtgtgacactttgccagggtcccacctagatgctccgacatccatgttcactgggcgtcttgcagtttatctggggtccctgcgtctggattcagtgctgtgtgtgacactttgccagggtcccacctggatgctccgacatccatgttcactgggcgtcttgcagtttatctggggtccctgcgtctggattcagtgctgtgtgtgacactttgccagggtcccacctggatgctccgacatccatgttcactgggcgtcttgcagtttatctggggcccctgcgtctggattcagtgctgtgtgtgacacttcgccagggtcccacctggatgcgtcttgctcatcttgtgacttgcttctctcttttgtgccaccccctggctcctagaggccaagctgaagaaaagtttctatggaattgtcacagaaacattgagattttgcttttacagggtcgatacagagtcgacacaaaaaatcacgatgcgattgatgcagagtggccagtgataatagctaacgttagcctagcgcttgctgtgtgtcctacactgttgcaggcactttgtctgtattaactcccttattcttcacaaagtctatgaagaagatacttatcatctccagtttacaggagagaacagagaggcacaaattaatggagcaaaagattaatgttcatgttcttttttttgagattgagtctcgctctgtcgcccaggctggagtgcaatggcaggatctcggctcactgcaacctccaccttctgggttcaagggattcttttgcctcagcctcctgagtagctgggactacaggcacccagcaccaagcccagctaatttttgtatttttattagagacggggtttcaccatgttggccaggctggcctcaaactcctgacctcgtgatccacctgcctcagcctcccaaagtgctgggatgacaggtgtgagccactgtgcttggcctagcctttcaaagtgctgggatgacaggtgtgagccggggtgcttggcctagcctttcaaagtgctgggatgacaggtgtgagccactgtgcttggcctagcctttcaaagtgctgggatgagaggtgtgagccacatccattagggcccgtcaggaagcagatgccacactcaggctgaggagtgcggggagagctatgacggaaatgtgggcagggtgagggcagggtctgtgtcctagacctggaggcagaggccatgtggtgagggcttctgggcaggagcgtgcacagcccgggtggcccacagtggggagctgggggtaccacatcccagcctcatgcccttgtcttcctctcatctcctgctggggtggaagagaggatggagaagcagggagaggggatccggaggggcccacgccaggaaaccaggctgtgtctaggtgcagctgttcttgccgagtctctcctgtctgcaaagtgagggtgataaacgcctgtcccacgtatgtcctggggctgttgtaaaaatcagctgagaagctggatgctggcgacgtgtgttcacggcgctgttctctgccagagtaagggataattgttgctgttgataaacactcactgggtcctcaccacgaactgagtcttttcacatcctcagttctgctgggagtctctaacctctggaggatgtgtcggcaaaggaaagagaaattgcaacattgcagagcctggattcgaacccagcgtccccatgtaaagtccgtgcagcactgggagagtcacttaatgagcctccgcagtgaaatgcatctcccgggctggtttggggctcccaggggaatgggtgctatgattaccattagctagtggtgtagcgggtgggagaggacctaacaggtgccttcggcccggctgtaaaaggagtgacttctggccgggcgctgtggctcacacctgtcatcccagcactgtgggaggtcgaggcgggtggatcacctgaggtcaggagtttgagaccagcctggccaacatggtgaaaccctgtctctactaaaaatacaaaaattagctgggtgtggtggtacacgcctgtaatcctagctactagagaagttgaggcaggagaattgtttgaaccctggaggcggagattgcaatgagccaagatcatgccagtgcactccagcctgggctacagagtgagacctcatctcaaaaaaaaaaaaaaaaatagtgactttgaccgggcacggtggctcacacctgttatcctagcactttgggaggcagagatgggaggattgctcgagactaagagttcaagaccagtccgggcaacatatcaagaccctgtctctacaaaaaaaattttaaaaaattagccaggtgtggtggaatgcccctagagtctaagctacttgggaggctgaggtgggaggatcatgtgagcccaggagtttgagcttacagtgagctgtgatcacattctgcactctggcctgggcaaaggaatgagaccttgtcttaaaaaaaaaaaagactggacttgtgggtgacggggatttccaacaaaaccttcccaggataggtgctgggaaggagatgagactcagaaaaaaaaaaaagactggacttgtgggtgacggggatttccgacaaaaccttcccaggataggtgctgggaaggagatgagactcagacaccccagccttgtatccctgagaagggatggtgtccttggaacgggaatccacatagatatttagcaggcagggcggtccagcgacacctgcccgcttccctcagaaggcaccgtctgcagcactcgtacaggtggcggggccagagagcaaggctcgatggagtgacgttgcctccaccgcacgggcgtcccaccttgggagatttccgtatcgctgaagttccctttgtggagcgtggcctctgtgaaaagtgttaataattcacggtagaataggttctcagatgcgccacgtctgtcctcccccacttcttcaacagagaatggcaacacctccattaacctgaatgtgagctcctcgggggtggccctggctgagtcatctgcgccgcctccctccccagagcctcgtacgcgctcggcgtctggctgtcgtgtgaactcagctccacagggcagacatttggtctgtttgctgctccgtcgtacccctggcacctggaacagtgcctgaaccatgagaagtgtttggtgagtgaatgaatgaatgaaaaatgaatgaacggacattcactgggattcagttctccttagagtcagagagacgtaggtgtcaatgctggttgcatgaagctgttacatctttgagcctgtttcctcatctgaatttggggtgtaattcctactgactgtacagttgcagagctgacatttcatgaactttgcttaaataatgtgtgagtgcctggcccataagaggctgtgttagtccttttgtgtgtgtgtgtgtgtgtgtgtgtggtttttttttgttattgttttttgtttttgagacagagtcttgctctgtcgcctaggctggagtgcagtggtgtaatctcagctcactgcagcctccacctcctgggttcaagcaattcttgaaccttgtaccagagaggagaggtacagcggccctagaccccagggctctgctcctattggtgtaagtgtttcctcctgcgccctacctccctgtctccaggcagggcctgctgtgggtccctctcctctcagccccaagggacctgttccctccagaaggcacctccccaagcggcggcagcgtcacgtgtgaggcctgcagttcagggccagcatccctcatccctcgccgagatcaggccctggaggggctcccacaggtctgactcaaaggcacaggtccctgggcctccctcctcagcatcgtggacccacgaccaaggacgtggaagggattctgaagattaatggtcgtaagtgtcactggcttttactgagtgcttcctgtgtgtgagtactgcgttcctacttctcctgtgtgtgagtaccgcatacttcccttgtgcgtgagtaccgcattcctgcttctcctgtgtgtgagtaccgcattcttacttctcctgtgtgtgagtaccgcatacttcccttgtgcgtgagtaccgcattcttacttctcatgtgtgtgagtaccgcattcttacttctcccgtgtgtgagtaccgcattcctacttctcccgtgtgtgagtaccgcattcctacttctcctgtgtgtgagtaccgcatacttcccttgtgcgtgagtactgcattcttacttcccttgtgtgtgagtaccgcattcttacctctcccgtgtgtgagtaccgcattcctacttctcccgtgtgtgagtaccgcattcttacttctcctgtgtgtgagtaccgcatacttcccttgtgcgtgagtactgcattcttacttcccttgtgtgtgagtaccgcattcttacctctcccgtgtgtgagtaccgcattcctacttctcccgtgtgtgagtaccgcattcttacttctcctgtatgtgagtaccgcattcttctcttgtgtatgagtactgcattcctacttctcttggactcctgagagttccatgactaagacagtagtttaatatagttggtttcctttgtcatcctgcatagtttagttttacgcatttcaaaacattcttcagagaaaggtcccttggcttcaccaggctgctgtgggtccaaggcacgaaagcatgaagagtctctgctcatcgccagaggactgtgagtcccaaacaggctccctgtagtctgaacaggcttcagccttctctgggtaatcctaggctgtggttacaacggtggctttggctgcactgggaggcaggagatctgggtttttattctacctccgccactcccatgccagccctctgtgtcctcagctgtgaaatgtaagggttggactagccctacgcacttttgattccttttttttttttaagacagagtcttgctctgtcacccaggctggagtgcagtggcacggtcttggctcattgcaacttccaactcccaggttcaagcaattctcctacctcagcctcccgagtagctgggactacaggtgcccaccatcacgcctggctaatttttgtatttttagtacagacaaggtttcatcatgttggccaagctggtcttgaactcctgacctcaggcgatctgcctgtctcggcctcccaaagtgctgggattacaggtgtgagccaccgcacccagccattttctgtgttatatgtgaaatgtagcaatatgcaaaacagcacatacaatgtctgggtttggtttactaaagactaacgagacggctgggcgcggtggttcacgcctgtaatcccagcagtctgggaggccgaggcggctggattgcctgagtccaggagtttgagaccagcctgggcaacatggcgaaactccatctctactttaaaaaaaataaataaatacaaatttaaaaaaagaataaaaagaagaagaattacattgtaagcatgttcctgtgagctgcccttttctggttaaatttatgtttttaggttcatcttcgctcctgcctgtagctctaaactgtgcaccgtcaaagctgcctggaattccattgcaggaataaatggcggcttactcaggggtggtcacgctccttccacctgttggaagagaatccatagtggaaaatcatttcatgctgcaacgcgacacacatacgtacatctgcacacacacatatacccatgcacgcttgaaatgagcctcataaagtaatacctgcccttattaggcgagataatccttttcaatccattctagaaggtgacctaccaaactgcacgatcccttcctaggctgacctgcagcatgaatgatacggggctgagtgcaccccatcgtgggtctgcctgggtgcgcctgaggttctgtgcctggcaggcaggctcaggtcatggtcctgctgatcccaccaggctgtccgcacgcattggcgtgagagcggtgtgcctgccggttcctttccttcatctgccgggattgttggcttccccctgttccgctgggcgtgttccagcagcggctcttcccttgtagttgctgcttctcatggcctgtggcctgagggaccagccccctaggcatgttagaactgtgtgcactgaggtcgggcgcggtggctcacgcctgtaatcccagcactttgggaggccgaggcaggcagatcacatgaggtcaggagttcgagaccagcctggccaacatggtgagaccctgtctctattaaaaatataaaaattagccgggcgtggtggcgcacacctgtaatcccagctatttgggaggctgaggcaggagaattacttgaacccgggaggtggaggttgcagtgagctaaggttgcacctttgcactccagcctgggcgacagagtgagacttcatctcaaaaaaaaaaaaaaaaaaagtaatgtgcgctgtagcacgactgacttagtagcaagagagggtagtgtctgagaccagactgcccgggttccaagctttgccactcagcagctgtgtgaccttgggccagtcatctgacctatctgagcttcggtttcctcatccgtaaaattgagataatattagtgcctgcctcctggcgcggtgtgaggctgcggtgagttaacttatcgtatgtgtgtgtggactgttgttattactgagcctgcctgtgcgtcagagcctgacattgatctaattctttgctggtatccctggacacagtggctgtgttgaaatgagctcaaaaccctcggctaaaaggaggttggaggtggacggaagagccacttctcaggctgcctgtattcagatcccagcctcaccattaagtaactacgtgactatgagcaagttagtccatctccctgtgcctcagtttactcctctatgaaatggggatagtagtggaactcactattcaccaagtaattgttaagaggattacataagataatgcacataaagctttttttttttctttttgagacagagtctctctctgtcacccaggctggagtgcagtggcacgatctccactcactgcaacctccgcctcccgggttcaggtgattctcctgcctcaacctcccaagtagctgggattgtaggtgtgcgccaccacgtctggctaatttttgtatttttagtagagacgagttttcaccacgttggccaggctggtcttgaactcctggcgtcaggtgatccttccacctcggcctcccgaagtgctggcattgcaggcgtgagccaccacagcatttagctctgccgtctacccggctacccagccaggaactcaggagaggccttttttttttcttcacatgaaaagaggtttattttctcactggacactgtcgcccatgtgaagggagcagccacctggccccaggttccctctcaacaaaggctcagtcctcagaatggctcctcatgagccccctgcagccggaggcctaggctcttccccacagcatgtgccccttagatacccgtctgccctctggtgtaggctggtgggcatgggtgtctgaatttgggtccccacagcacccccattgaggatcacagtgttggagttgaacctggggccacctgggtaccaggacactgtgctccacggtgagcacctctcctgtccctcgatggccagcaggatctggtcacccacctacctgccaccctatccttttttttttttttttttttgagacggaatttcgctcttttgcccaggctggagtgcaatggcgcaatctcggctcactgcaacctccgcctcctggattttcctgcctcagcctcccgagtagctgggattacaggcacctgccaccatgcctggctaatttttgtagttttagtagagacagggttttactatgttggttaggctggtctcaaactcctgaccttgtgatctgcccgcctcggcctcccaaagtgctgggattgcaggtgtgagccactgcggccggcctagatgtctttttatcgttgagttgtaagatttttaaaatatagtctagatatgttttcttcccctctgcacattgtcttttcactttcttgatggggtcctttgaagcaaagaagtgttcattgatgacgtgcggttcccccgtgctctctgttgcttgtgcttctggtgtcgtatgtaagaatcctttgccaagtccaagaccatgaagatctacccccaggttttcttctacatgttgtttagctttagctgttacatttaggtctttgatccatttagagttattttttgaatatggtagaaagtaaaagttcaacttttacatgtggcaatctggttgtcccagcaccatttggtgaaaagattcttctttccccatgaagggtcttggtgcccttgttgacaatccgtcgaccatagatatgtgggttcctttctggactcactcaacgtgactccgtggatctgtgtgtctggaaagatgcccccagcctgacagtttaccttctttgcccatctgctccagtcatcctggaggctcccatagtacacattgctgggacatcccagagctgaacaccatctctcaagtggcctcagagctaatcacttcccacaggcatcgaggcgaccacagagagggcccagtgtgactggctggcccccagggcgcccgggaagggatctgcagatccctcctcctggcacagcgtcctggcaggaggcacggtcccagagcaggccctgtttgtgctgaggccccgccaggattgggtggatgccttggtgagggccaggtaggagggaacaaatgcagggtgggaagtggctgctggaatggggaagggagcggggcctgcaggagggaagcattcttggcactagtggcatcgtcaccaggacaccggccttgggagggcgagcactacatccatgggtaggcgccggagccctgaggacacggcattgccaagctcttgtcctgtggcttccttccctgtgtccgcagtgtgtggggggtgggcgggcaggcaggacgaggtgacccccatcctttctgtgtgctcgttccatgaaattgggggatgtggatgcttgaacgggctctcagctagtgtgccttccgtgcagaggaggtaacactccccagggcagccagacacccttgtggagtgggatggaaagctgggaggaaggggctggccggcaccatggagatattttggtttgcaggaggattctgggctttatgagcactttaatgcaaccagggcaggcagcaccacgggacgggaactgtaagctgcacctgttgaattctgaaggtccgggctgcccgtgggccccgggaagtgggggtgcccagcttgtggggtgcaggcggggaggggaccgtgtggtggtggagacgccatggtacagcctgtctcccgatcccccaggtcccctgaggccttagagatgaatctcccagaagtggcagccgcggcagggacaccaggatcatgaaggacctgggaggtgaacccgctgctcagttcctggccctcgtcccttagacccagtcctcggagcagaactgggggaagctgagatttctgtgggctgcgtgcccacctcctccctcttcgttggtcctcccacgcgcccgcccccgagtgggagcagagccatgtgagctgagttggagctgctcgctgccgagaattgcatcagccccgcctggcaggctggagcgggagcctgttgctatggtgaccaccaggcttcaaaccagtgagaaggatgagatggttgccgggcgaggttttctcaccatgtgatgcgtgtgacaggctgacaggttcggtagacctggacccagccctcccgtaggtgtgcctggacccccagccctcccgcaggtgtgcctggacccccagccctcccgcaggtgtgcctggacccccagccctcccgtaggtgtgcctggacccccagccctcccgcaggtgtgcctggacccccagccctcccgcaggtgtgcctgggtccccagccctcccgtaggtgtgcctggacccccagccctcccgcaggtgtgcctgggtccccagccctcccgcaggtgtgcctggacccccagccctcccgcaggtgtgcctgggtccccagccctccccgcaggtgtgcctggacccccagccctcccgtaggtgtgcctggacccccagccctcccgcaggtgtgcctggacccccagccctcccgcaggtgtgcctggacccccagccctcccgcaggtgtgcctggatccccagccctcccgcaggtgtgccatctgctggggggcatgatgggcactgtcccaaaagccatctgggcattggccaggctggggggtatgactgagggacacagggggccacgccaggcccatgtagtgtcagggggccttccttggtccttctgcctagttgtgggggaaggggtatggtggggatttgaccaagtgcacctgatgatggggcaagaaaggggtccagactggtccccatctcccagaacagagggcggctctggatcacagctgattaaacctgcccaggctgtgtcaaaaattttttttttaacggagtttcactcttgttgctcaggctggagtgcaatggtgcaatctcggctcattggttcaggcgattctcctgcctcagcccaagtagctgggactacaggcgtgcaccaccatgcctggctaattttgtattgtcagtagagacaggtttcactgtgttggccaggctggtctcaaactcctgacctcatgtgatccacccaccttggcctcccaaagtgctgggattacaggcatgacccaccgcgcccggcctgtgtcagaattttttttgttaaccacgtgacaaagctcatcatcttgctaaagataacagagcgcttggccaagccagtgcaatgcctgggttcagatctcctctctcatcttttgcctacaacgggaaaggaggtaaaaagtctgtgttccaggtgtgctgagcacttgttgtgtgccgggagttgtagtagacactgtcctgtctttttttttttttgagacagagtttcactcttgttctccaggctggagtgcagtggcgcgatctcggctcactgtaacttccacctcctggactcaagtgattcttctgcttcagcctcccgagtagctgagattacaggcacgcaccaccacgcccggctaattttttgtatttttagtagagatggggtttccccatgttgaccaggctggtctcaaactcctgacctcaggtgatccacccacctcagcctcccaaagtgctgggattacaggcatcagccaccagcccagcctgtcctgtctttttttttttttttttgagacagagtctcgctctgtagcccaggctggagcgcagtggcgcgatctcggctcactgcaagctctaggttcacgccattctcctgcctcagcctcccgagtagatgggactacaggcacctgccaccacacctagctaacttttttgtatttttagtagagacggggtttccccgtgttaaccaggatggtctcgatttcctgacctcgtgatccacctgctttggcctcccaaagtgctgggactacaggtgctcaccaccacgcctggctaacttttttgtatttttagtagaggcggggtttccccgtgttagccaggatggtctcgatctcctgacctcgtgatccacctgcttcggcctctcaaagtgctgggactacaggcgctcatcaccacgcccggctaacttttttgtatttttagtagagacggagtttcctcgtgttagccgggatggatgtcctgtctttctattgtatcctctccctcacttggggaggaggcagtgatgttcctgttttgcagaagagccggatcgggcagccagagagttgaagtgacctgcccaaaaagggttcaacctaaatccttgggcttcctgtccagggctctgtaggatgtcagccatccccagaatcaggcattctcaggatgtcctgtgaagaaacacacttctccatcccctgctggaaaaaccatgacaatctctccgcagggaagaacgcggctttgaggtggggagtggctgaccgaggccctttgtggtttctaaatggcagaatgagagaggtgggggcgttgagggtgtcacgcccaggaagcagttggggagggcagggctggacactgaccaagcctagcctgggtgcaggaactgagcttgggatttttgcttggggccctctagggattaggatgaattgtcagatgagttctcagcagacagggctttagggaactggtccagggaaataagacgtagagccagaggggaaccagggcctctgtgagagcctggcagtcatgagatctgacttgctgagcttctgaggtgtggtaataggaactaatcctctcttcggtgtgctttagatgtttactcgtttcatcctcacagaaaccctgtgaacttgggtgctactgttactccatgttgaaggtaaaacagaggcacagagaggttatgtgacttgcccaaggtcacacagctggtaaggggtggagcctgtgattcagacccagtcagtctggctgcagagcatgagctctgaatcaaatgttctcctgcctccattcttaccttttagaaagatgacagcaagttgcatacgtgacctcctcacccccaggagtgtgtgtgtgcacatgtgtatatatatgcacacatacgcgcaccagtagctcagcaagggagggaggctcaggaatgggctcgtgggcctctgtgtgttgatggctgggtttgcagaacctagggagtccggcgtctgtgtgcgtgatgctcctcccttcgtccctccctgctcgcgtggttcccagtgggtggggtgccctgttgcctctggtttagagccgtgcaggatgttaccacagaccgtgtaccaggagtgttcacccaaacttgtgaagggccctggactcccaggaaggagctcagatctaggactgggagtggacggcggccgccggaggagtgagagggggcagtgcgcttgccatgcccggggcccgtcctcctgggcctctctcggcgcttgggcaacctgtgtattgcccacacgtgtgccgctgcttgcagctcctggccaccaccctcctctttgtgtctggacgaatctgactgctctgagcacctcttcagagtggaatcatacaggacagtgtctaccgcaactcccagcacacagcaagtgctcagcacacccggaacacagacttcttacctcctttcccattgtgggcaaaagatgagagaggagatctgagtgcagacatcgcgctggcttggccaagtgctctgttatctttagcaagatgaagagctttgtcaggtgggtaacaaaaaaaattctgacacaggccgggcgcggtggctcacgtctgtaatctcagcgctttgagaagtgtgtcagcccttgagaagacaccgggcaagctggccttcctctcggtgtctctcccaggccgggactatggggagaaatcataacaacagggacaacagcagtgacaacgtcagtgacgacaataacagccactaacgttataccacgtgccaggccctgttcttagaacttcgcctggactaactcattcaactgtcacaaaagctgcatgggatgatgttgttatgttattatcttcatttgacaaatgaggacactaaagcacagagagatgaagcaacttgccccaggacacacagctaaaactgggagtggaattcggagagcctggctcctggcatttggagctgacaggtgcccggcaacccctacctatggccgagctgagctcgtcttgtgccagggagttggcggcaaaacagaaatgagctctgggccgggcacagtgcctcacgcctgtaaccccagcactttgagaggctaaggtgggtagatcacctgaggtcaggagttcgagaccagctggccaacatggtgaaaccccatctctactaaaaatacaaaaattagctgggtgtggtggtgcatgcctgtaatcccacctactcgggaggctgagacaggagaatctcttgaacccgggaggtggaagttgctgagatcacaccaccgcactccagcctgggtgacagagtgagattctgtctcaaaaaaaaaaaaaaaaactaaaaccagaaatgaattctggaggtgggatcttcctttgtaattcagaaggtgactcccaacccctcttcagaagctgggtgggctccaggcctggttcagccccctggcctcctgtcgatacccatgggggggtctctgtccctggtattactcctttcctgtctactttttttttaaatttagattttattctatttttttaaattatggcaaaataggccgggcgctaggtagctcacgcctgtaatcccagcactttgggaggccgaggtgggtggaccacgaggtcaggagatcgagaccatcccggctaacacggtgaaaccccgtctctactaaaaatacaaaaaaatttagccaggcatggtggcaggcacctgtcgtcccagctacttgggaggctgaggcaggagaatggcgtgaacccaggaggcggagcttgcagtgagccgagatggcgccactgcactccagcctgggtgacagagtgagactctgtctcaaaaaaaacaaaaacaaaaacaaaaaacaaaagaaaatcatggcaaaatacacatgcctaaaattttccatccagtgtacgcatcagtggcccgaggcacgttcacactctggtgcggccatcagcaccgtcatctccggaactctcacctggctaaactgagactccgcatctgtgaaaccagcgcaccagggaccggcttcgtggaagacactttttccacggaccggggaagggtggggagcgctttcgggatggaactgcgatccctcgcacgcgcagatcacgacagggctcacgctcctacgagaacctaatgccgctgctgctcggatgggaagtggggttcagggggtgacgcttgctcacccaccactcacctccggctgtgcatcctggttcccaacaggccacggactggtgccggtccatgcccgggggggctggggacccctgtattgaacaacagctccccgtttctccagcccccagctcctggccaccaccctcctactttctgacttgatgaatctaactgctctaagcacctcatccgagtggaatcatgtggtatttgcctttctgtgaccagcttctttcacgtagcctaatgcccccaaggttcatcgatgtcagaattggcctgtgtcggaatataagccgaataatatccgttttatgtaaaggccgcgttttgtgtatccattcatccacccatagacacttgaggtgtttctgttttttggcaagtgtcaataatgctcttaggaatgcgggtatttccccgacaacctttgggcttacttcactcatcagcagcaagcaggccatccttgaagcttaccgtggggtgggcccattgaccagcctggggagagtgggtgggtcattgaccagcctggggccatcatgctggctgggaaggcgtggccctcaggtgccagcttctacccaacactaagccgttggtgctcctggcacttacttacttgctggaagacattccaccttgctttcccgtctttccccagaagagggtgctgggtttctgcttctctcctgaatgggaaaagggcggctgcagcttgccatgaggctggcgtgggtggggttaggagaaaggactgtcaggtgctgtgttgggaagtgtgtgtggagcttccgtgaggctggggttggccttctgagcatacatggaagggctgagtgggagcagggtgttagggtagccggtcatgccgtagaaccaaattaatgctgaaggccgggcgtggtagctcacactaatcccggcactttgggaggctgaggcgggtgggtcacctgaggtcaggagtttgagaccagcctggccaacattgggaaatcccatctctactaaaaatataaaaattagctgagtgtggtagtgggtgactgtaatcccagctactcaggaggctgaggcaggagactcacttgaactcaggaggcagaggttgcagtgagccaagattgtgccactgcactccaggctgggcgacagagtgagactctgtgtcaaaaaaaaaaaaaacaaccaaaaccccccacaaattactgctgaaatcctcatcacttaacacaagcaagctgctgcttgctcacagtggtcctggtagacggggggctctgctccccgtggtcatgccgggacccagcctgatggagactgcaccatttggaatatgtggcctccaagggtcacagagggaggagaaagggagaaagagctgtgtgtaatttttcactgttcagccgtgaaatgatacttgtcatgtccacttacagtttgttagccaggactgagcacctggccctgcccagggactgccaagtggccagacagtacggccttccatgtgcccagaaagacaggaggatggggatattgctgggcactggtcgtgttgaccacatagtggcaggtggcttatgtgaaggatgaaggcccttgagcctgctctgtggccagggcagtggtgtcatggtggcagtggtggcagtggcggcagtggtgtcatgtagcaatggtggcagtggtggcagtggtggcctggtggcagtggtgtcgtgtggcagtggtggcctggtggcagtggtggcatggtggcagtggtggcctggtggcagtggtgtcatgtggcagtggtggcagtggtgtcgtgtggcaatggtggcagtagtggcagtggtggcatggtggcagtggtgtcgtgtggcagtggtggcctggtggcagtggtggcatgtggcagtggtggcatgtggcagtggtggcagtggtgtcatgtggcagtggtggcatggtggcaggtgtctgggcactgaagggacttgggtgtaactgacttctaggggaagtggcagaatcatggtcatcttcatgtgccccgcactgtgctgagctgtttacagacgtcatctcatggaatccccacaacaatcctatcattccgtttcacctttggggaagccagagctcaggaccacagcctccaagtgatggctgtgcttgctggtaggagggtgcttatggcagcagagaggccgggggctgaatggagtgtgggggccagaggtggtggggccacaaggatgtgatgtgtgtgtgtgtgtgtgtgtgtgtgtgtgtgtgtgtctccatgtgcctgcgtggatagaaacaagcagagacaagctggctgggcttttgcccttccccagctccgcgcacacctagctttgcaccactctggaggaatggtgacgtcgaatgtccaaggaagaggctaacctgggcacgtcctcttacctgccctccttgaatgacacaagacattggaagtggaagtcacagtcaccggtgctctggagctgggagtggggagaaggaggtgacttttgaggcactctgtgacagcccagttcaacagtagaattatgtttaaggcccaggaaggctctgggtggagagccagcattttgagccgaaggccagtgaacgtggccacccagcagcactgggcagaggtgcggctgcttctgcaggtgtatgtgtgaaggggtgcaagtggacgccttgggcgacttctgcggacaggggcaggagcccggagctgcgtggctctgggattgaagggcaccctggggtggaaggcaggggtcgtgcatcctggtcctggctgctgccaccctgcagggctgctttgagagtcttgctggcctctctggacctggcattacttgtctgttctctgaattgcctcttcctacttctcagcactagattgtcatttaatttttcataaataccctaaggacttacaaagccatagatgggaggggggctccgaggaggccatcccaggcaggtggtgagcaccgttggattgaaaggtcctcccaggtcatcgcctcctggccacccgccttctgcagctctggggctgagtggcatttcccacagggaaagacaggaggaagagcagagccttaaatcaaatcagcccaggattattacttgttatcaattcttgaggaggttcggaggggaagcaggaagtaggctgaagctgttaactctaataagggttagaactcctatgggatttgtcagaaggacttcctggcccccagaccctaaataattgaattggttgttatgggaagagatgaggaggattattaggagatcgtatcactcagccagcagttactgagcattggctctgcgtgagtcctgtcctgggcgccacaaataacaggcagtgagcagaagagggccaccacctcgcggggaagacagaatataccgataacccaaacgaactcagacttgctttctttgtagaggatttattttctttctttttttcctttatttttatttatttattttttttgagacagagtctcactctgtcacccaggctggagtgccgtggcaccatctggcctactgcaacctccacctcctgggttcaagtgattctcctgccacagcctcccgagtagctggaattacaggggcccgccacacacccagctaatttttgtatttttagcagagatagggtttcaccatgttggtctcaaactcctgacctcaggtgatctgcccgccccggcctcccaaagtgctgggattacaggcagaagccactgcacccagccctaatttttgtatttttagtagagacggggcttcaccatgttgaccaggctggtctcgaactcctgacctcaggtgatccacccacctcagcctcccaaagtgctgggattgcaggcgtgagccactgagcctggcccctgcccctttttttttttttgcctgattgactgaacgcgttattgtttgtgaaatgctctttttatctggtatctcttgtcactccacaggggcagccctgtgaactgcgcagggcagctgtgtcttgcccattttacagataaggaagtggcggcacctagagattaggtctggacgcgggacccagatctgcctcctggccccatgcccacctcgttgaatcccgttgcctttccatgggcgactcgtaacggagctgggggtgctggagtctgtgcccgcccctgcatctggtgtgtgatagcttaggagatgtttgttgagtggctgttgcttgcgtacacatgccgtcagctttcgtcgtatcatggcaaggttatacggcccgtctgcaatatgattcctctatgttcggtgggcacataactgtctttcctacagagagatgaggaattttagttccctctgccaaggtggggggattttgtcaaatcgcaggaaacaatggccttggtgcaaagagtagctttaatctgtggctcagctgtttctcagccaggtggccttggatgagactcagaagcctcagttttcccccgtgtcaaagggggccattcatagctactttgacaacctccctgggctgtggggatgaaatgagatcctggccgtgggctcaccgtgtaaaacactgcgcagataatactcagcatgtcccatccatccccaagagctggagactggtgaagccacatgcgcttctctgcccagggctgctggccaccctgacaccctgggcctcagcctctgcccttgatgtccaagaactatgattcctttgtctcaggctgtggagccctgagcttctccaggcggccacttctccaggcggctacggtctctgcctccctcttccaaggatcttggaggtggatgattggatttcatctccatggcaaccagagaggccataacacccgcccatggtggggcctcgagtctgttcccagcagtggaggcagagccggagcaaacaactcctgcaacagcagctgtcccccaggaatgagctgtcccccaggagcgagctgtcccccaggagcgagctgccccccaggagcgagctgccccccaggaatgagctgccccccaggagcgagctgtcccccaggaatgagctgtcccccaggagcgagctgccccccaggagcgagctgtcccccaggaatgagctgtcccccaggagcgagctgccccccaggagtgagctgtcccccaggaatgagctgtcccccaggagcgagctgccccccaggagcgagctgtcccccaggagcgagctgtcccccaggaatgagctgtcccccaggagcgagctgccccccaggagcgagctgtcccccaggaatgagctgtcccccaggagcgagctgccccccaggagcgagctgtcccccaggaatgagctgtcccccaggagcgagctgccccccaggagcgagctgtcccccaggaatgagctgtcccccaggagcgagctgccccccaggagcgagctgccccccaggaatgagctgtcccccaggagcgagctgtccccaggaatgagctgtcccccaggagcgagctgtcccccaggagtgagcttcctcccaggagtgagctgccccacagcctctgcccggcctccagttgccgctttgctgggctaatgaggggctccaggcctcggggtgagggtggcgctgtctgtgctcccagtggctgctacaggccaggccgagggtcctgagtgaatgagacaggggccgacccccacccacccctgcctgtctgtggttcacaatcagagcaaagccctttccgtccgtcttgtcttctcttccccagcgaatcccacagtccccaagactgaggacaagccctgcctcttccgggcagccttccctgtgctggctgaattgatcacgcgcctggctgatggcttcataggctgcttcagagtattttttttttttttttgagatggagtttcgctcttatcgcccaggctggagtgcaatggtgtgatctcagctcactgcaacatccgcctcccgggttcaagcgattctcctgcctcagccccccgagtagctgggattacagacatctgtcaccatacccggctaatttttatatttttagtagagacggggtttctctatgttggccaggctggtctcgaactctcgacttcaggtgatccgcctgcctcggcctcccaaagtgctgggatgacaggcgtgagccactgtgcccagcaagagtcttagttccatttggttgtaaagacgctcacttcagtgtccctgtctgaacctggcggctcttggccttcctatacattagagtcacctggggagcttttaacaggcctgatgcccaggccattccataccaattcagtagcaatccctggggtaggagccagagagcttcccaactccccagggattccagtgtgcagtgaagattggaacagttatcttaggattcaagtcatgaactggccgggcgcagtggctcacacctgtaatcccagcactttgggaggccgaggcaggtggatcacctgaggtcaggagtttgagaccatcctggctaacatggtgaaaccctacctctactaaaaatacaaaattatccgggcgtggtggcgggcacctgtaatcccagctactcaggagactgaggcaggagaattgcttgaaccggggaggtggaggttgcagtgagccaagattgtgccattgtactctagcgtgggagacagagcaagactctgtctccaaaaaaaaaaagaatttaagtcgtaactagtccaccagcctgtgctgaatggaggctgactgatgaacagcagagttagctgacaaagcttgctgtagtcttaactcactgcaaattgccaaagccctggtttgttttttaagggctgggaggtccctaagggttcttggtactcaggaaggagagcaggggaataatgataatagctgccgttttgttagcgccagctttgggtgccttgcatagcatatatttcctcattgtaacctcgcaaaagcttcatgaggtatagatcttgtttttatcctcattttagagatgagaaaactgaggctctgaatggctaagtagcttgcccaaggtcacatggctaaggtcacattcccgaagtgctaatctcaggaatggaacccgagtgtgattccaaagcctctgcccttgaccactgagctgtcctggctccccaacctctgctccatcaatcaaagaatggggggccctgagaaggaggtggcttgtcccgtgggaaagatgctggtttccaggattcctccccttggagccaggccctgactgaggggctcccgatggtattaaatatctcctggatcagctggggtcacctggaccctgaaggtgtctactttcccgttgcctacgacacccactcggcttcagctgagctttcccaaggacccttctgccctgatactgtgcccagttctttaacctacatcatgttatttaatgtcattttcacaaccaccctgtgacatggtatcgttatcctcatcttgtttctttgagacagtctcactctgtcacccaggctggagtgctgtggtgcgatctcagctcactgcaacctctgcctcccagtgcaatagaagactggccgggcgcggtggctcacacttgtcatctcagcactttgggaagccgaggtgggcggatcacttgaggtcaggagttcgagaccagcctggccaacatggtgaaaccccatctctactaaaaatacaaaaattagccgggcatggtggcgggtgcctgtgatcccagctacttgggaggctgagacaggagaattgcttgaacctgggaggcggaggttgcagtgagctgagatcccaccactgcactccagcctgggtgacagattgagacttcgtctccaaaaataaataaatcaataaaataaagtgcagtagaagacagtgtccttattgttgtaggtgaggtggtagattttgtatctgagccaccatccctgctgaaattgccccggacaggctgatctggtacaggtggcacctgggaagtggcagcctcgcttccgctggccagttccctggttcagggttgccggcctcccagatccacacctgtggtccagactctgctgtctggctgcccgttggatcttctgacagggatggccatgagtcttctcagtccagacatgtctccacctggacttagggtctgttcccccggaaccagctcccccttcctgtccatcgctcagccctccaagcccagaggaccctgctgtggccgcattttcagtcaactctcccatcgccagactttgcccttggttcccaccatggtcacctttgacaaagcacggaggggcggtttgccccgttccacatcatctcatgcaccacagtcagcttcgttttcctgaagtcacctctgaaatcaccttgccattttggcatccgtggctcccagcgtgcgtgaaatctgactattcaggatagtgttccaggccctctgcagtctgacccctccagagctcggcttcagtggtaccagtctgttcatcagggccaacctcctgcgtcctgcccccattctgcacgctgataccctgccgcaaatggaccttttccttcctcacgctctgtgactggttgtttcttccatatgaacccctcagggcagcccacacacttcgtgtttggtatttgtatgagtcctacatatgataacattttaagagcaaaggttgtggagttggatgacctgtgtccatctggtttcccacctgactgccgtgaaatcttgggcgagtaacttaactccctgcgctttcatttcctccattgtaaatgagtcataatggtacggaggcagaaatttaaaaacaaatatgtatgtatttactccaagaaaagtaacaggcaaggcaagggttaaaaagaaaaaaaaaacaggccgggcacggtggctcacgcctgtaatcccagcattttgggaggccgaggcgggtggatcacgaggtcaggagatggagaccatcttggctaacacggtgaaaccctgtctctactaaaaatacaaaaaaattagccgggcatgatggcaggcacctgtagtcccagctactcgggaggctgaggcaggagaatggcttgaacccgggaggcggagcttgcagtgagccgagatggcgccactgcactccagcctgggcgacagagcgagactccatctcaaaaaacaaaaaacaaaggaacaaaaaaaacctctttttttttctgcctagcaagctcactttaaggagttataagataacgctgtttaagaagccaaggctaaagaaatgggctccacacacccgccttttagagcaaggttgaaggaaaaaagaaagagaaattcctttactgttactcctttccctggcttcctaagcataactgtgtttacaaatgtctggatttagccagtccttgtttttcttttgacacagctacaagccacaagttatgcactatatgattaactgcttttgttttacttttgtgaagtctgcttataaaaaccccattctgtctttattcaatgctaagctttttaaatgcaaatccactgagctagtgcatacctaaaataaacagtccttcccttctccatatcggtctctccggtcctcagtttcctgcaacagtacaacttagattttaaatttttaagaagtttttcaggcagagtgtggtggctcatgcctataatcccagcactttgggaggccaaagtggaggactctttgaggccaggagttcaagaccagcccggcccacatagcaagaccctgtgtctacaaaaactttttcgaatcagccaggcatggttgtgcatgcctgtggtctcagctacttgggaggctgaggcagggggatcatctgagcccaggagtttgaggctgcaatgagctatgtttgtgccactgcactccagcctgggcaacagagcgagactctgtctctaaaaaaaacaaaaaacaaaaatcaaaaaacaaaaaaaagcttttcaagtgcaccagtcttaagcatagagcttggtgaatatttccatatgtctgcttgtgtaactaacacccagatcaagatatggaacatcttcagtgtcctggaaagttgcttcctgccccttcccagccaacactccctgtccccgtcgtccacccccagaaagccactgccatggacttctatcaccatccatttgtttcgcctgttcttgagctttgtatttaggctggtgcaaaagtagttgagagctggacgtggtgggtcacacctgtaatcccagcactttgggaggctgaggcgggtggatcacctgaggtcaggagcttgagaccaacctggccaacatgctgaaaccccatctctactaaaaaaaaaaaaaaattagccgggtgttggtggtgggcacctgtaatcccagctactcaggaggctgaggcaggagaattgcttgaacccaggaggcggaggttgcagtgagccgaaattgtgccactgctctccagcctgggtgacagagtgagaccccgtctcaaaaaaaaaaaaaaagtaattgtggtttttaccattatatattacctttgctccaacctaaagtaaatagcctcctgcggtgcaggcatacctcgctttacggcactcctgtgatgcgggcgtaccttgctttacggcactcatgtgcaggcgtacctcgctttacggcacctccatgcttagttgagcttcaaagatgctgcgttttttttcaccagttggaagtgtgtggccacctcgcattctctctgtgttacgtgttggtggttctcacgatctttcagacttttttattgttatgacacctgttacagtgatctgtgatcagcgatcctccatgttagcattgtcattgttttgggcaccacagaccggacccggcaaccttcatctatgaacgttgtgtgttctggctgttccgcccaccagcctttcccagcctctctcctctccccgctccagcctccctattccctgagacacaaaaatatccaagttagtccagtgagtaaccctacagtggcctcgaggtgtgcgtctgtcactttaaatcaaaagctagaaatggttcagtttagcccgggctcggtggctcacgcctgtaatcccagcactttgggaggccgaggcgggcagatcacgaggtcaggagttcaagaccagcctggccaacatggtgaaaccccatcgctactaaaaatagagaaattagccgggcgtggtggcgggcgcctgtaattccagctactcaggagtctgaggtgggagactcacttgaacctgggaggcagaggttgcagtgagctgagattgtgccgctgcactccagcctgggtgatagagactgtctagaaaagaaagaaagagggagagagagaaggaagagagaaagagagagagagagagaaaaaagaaatgatttagtgtagtgaggaaggcttgttgaaagccaagataggctggaagcggagcctctcctaccagttagccaaattgtgaacacacaggaaaagtgttttaaggaaattcaaagtgcttctccagtgaacacaagaatgataagggaaacagccccactgctgatatggagaaagtttgagtggtcggataaagatcaaaccagccacaacgttcccctgagccggagcccaatccagagcaaggccctcgcactctgcaagtctgtgaaggctgagagaggtgaggaagctgcagaggaaagtttgaagctggcagagatttgttcatgaggggtcaggaaagaagccgctttcataacagaaaaaggcaaagtgaagcagcaagtacggatggagaagctgcggccagttgtgcagaagatgtagcaaagactgtaaaggaaggtcaccgcactaaacatcagatttttggccaggcgcggtggctcacgcctgtaatcccagcactgtgggaggccgaggtgggtggatcacttgaggtcaggagttcaagatcagcctggcctacatggtgaaaccctgtctttactaaaaatacaaaaatcagccaggcctggtggtgcacatctgtaatcccagctactcaggaggctgaggcaagagaatcacttgaacctgggaggtggagcttgcagtgagctgagatcgcgccattgcactccagcctgggcaacagagccagactctatttcaaacaacaacaacaaaaccaaacaaaacaaaaacaaaacagatcagattttcaatgtagacaaaacagccttctattggaagaagacatatgtaggactttcatcctagaaaagggatccgtgcctggcttcgaagtttcaaaggacagaaggacaggctgactctagtgttaggggccagtgcaggggtgactttaaaccagtgctcactgaccattctgaatatcccagggactttaggagtaatgctcaaacaatggtattcttcacagaaatagaaaaaaaaaaatgctaaaatttatatggaaccaaaacaaaaataacaaaactggaagaatcacattacctgactttatttgtttattttttttgagacagagccttgctctgtcacccaggctggagtgcagtggcccaatcttgcctcactgcaacctccgcctcccgggttcaagtgaatctcctgcctcagccccccgaatagctgggattacaggcacctgccaccaagcccagctgatttttgtatttttagtagagacaggctttcaccatgttgaccaggctggtctcaaactcctgacctccggtgatctgcctgctccagcctcccacagtgctgggattacaggtgtgagacaccgcacctggcctctctgaagacttttgatgcagctttggtggaataatggtcagggctgggctccctcagctgctcttccctctctcattcccatcctcaattcttgggcagaaaataagtttatcacttaacagtcagcctctgtatcacccttgcgacaggctggagggtgtcgctccagcctgggcaacaagagtgaaactctgtctcaaaaaaaaaaaaaaaagacaaaaagaaaaagaataaaaaataaagttagcaatattcagcaatgatgtggccggcaagagcctgcagaggatcatgggccaggtcacccatcctcactgagtcctgcacggctctcggctcagctcacgaggctctcaggagcaagtccctgcctcctctccagcacggccctctccccctctgctcactctgtgttctagccctcctggctatttatagtcccctccaggggccctgctgtttcccactgggtgccactgccaagcctcctctcaccgcctgaaactctgctcctgtcccccacccgcctggcaggcacccacacagctttcaagatccaattaataacagtaataatagcagctgagatggattgggtgcttcctatgtgctaagtgccgtatgcgtgtcatccagtttaacccccgcagcggcccgtgcacttgatcctgtgtcgtcccccgtttcacacggatttgctaaacccgtatccatttagtagcagccaccctgtgccaggcactcctcggaggcacagagaggttaggaagtgccagagcgtgggctggaacctccgctgccggaccgcagggtccctgctctcagccacagcgatgaactgtcttccttagcgtggcaccaaagcctccccagccacctcccctccccgagtgttgcccacaccctccggtccgccttgccgggcctttgaggcctctgtcgtagcatctcggagatttgattgctgattggactcgcttcctctctgggctgtgaggatatcatttggaaatgtgttcattgtaagcagcagaaaacccaatatatagggacttgtatttcccatgagcaggaaatgagacaggctcttcctagtgtggctcagctgaacagcatgagggaaatggctctgttcttttatttatttaatttaatttaattaattaatttttatttttttgagagggagtcttgctctgttgccccggctggagtgcagtgctacaatctcagctcactgcaacctctgcctcctgggttcaagtgatctcctgcctcagcctcctgcgtagctgggattacaggtgtgtgcaaccatacctggctaatttttgtatttttagtacagacggggtttcatcatgttgagcaggctggtctcaaacttctgacctcaggtgatccacctgcctcagcctcccaaagtgctgggattacaggcgtgagtcaccacccggctaatttttgtagtttctgtagagatggggtttcaccatcttgcccaggctggtctcgaactcctgacctcaggtgatctgcccgccttggcctcccaaattgctgggatgacaggcatgagccacgcgcccggcctctgttctttcttgacctgttcctggtggcagcagtaaagccaccgtaactccaatcatcacccatgagttcaaggcaaaatgtctctttgtaatcatcaaagtcagggccttgccagaggtcccagcatgcttcacttgggtctcagtggccagaatggtgtagggcagccgttcctggtaatgagagaggcagagaaagcgggtatcttgcctgggactggtctgttgccacttcctagaaaacgagggtagagtaagcaaggaagaagggaagacgggtgtcgggtgtctgccagtgccctagagcgcagagaccgtacattaattttttcaaaatttccagaatcggaaggctctaatgattttgtgttgtagccttccagtcttttttctatgcacgtatgtttttacttttttcagacattgtaacatactttaattattgttattaatctctttttgcacttgataagatgctattcatcatccatatagtttttaatgctatatagcagcccatcttgtagaaaaaccataattgactcaaccagtctcataattcaggttgtttttaatatttcacacttacagacagccctgtgacttacaactttatttttatgttcatttataactagtatcatagatcataatcttattacgctgggtataaactgtaccaaccactaaaccttttgataccagttaccagattgactctagaaaagttgggccaactttttttttttttttcgagacggagttttgctcttgctgccaaggctggagagcaatgttgtgatcttggctcaccgcaacctccacctcccaggttcaagcgattatcctgcctcagccttcccaagtagctgggattataggcatgtgctaccacgcctggctaattttgtattttagtagagatggggtttctccgtgtgggtcagcctggtctcgaactcctgacctcaggtgatccgtccacttcggcctcccaaagacctggggttacaggcgtgagccactgtgcccagccaaagttgtgccagttataggcagcctccaagagtttctgtgagtacctatgccctgacagctctggatattgttattattatcttaaaatccttgccaatttgacacgaacagtgaaaactatatagaactttacattttctttcattacaaatgaggttaacattctttttaatgcattttgaatatttgtagttctcttttaaattttctgttcatttcccttacacatttagaaagttgaggttttcatcttttctcattggcttgtaaaagtgctttattggccaggtgtggtggctcacgcctgtaatcccagcactttgggaggccgaggtgggtggatcacaaggtcaggagttggagaccatcccggctaacacggtgaaaccccgtctttactaaaaatacaacaattagccaggcatggtggtgcatgcctataatcccagctactcgggaggctgagacgggagaatcgcttgaacctggcaggtggaggttgcagtgagctgagatcgtgccaatgcattccagcctgggtgacagagcgagactccatctcaaaaaaaaaaaaaaaaaaagtgctttcggtattcaagtattatcataatatgtagaatacaggaaagttcctgggagagggcacagatgaggcagatttgagggcaaaacaggatttcaccaggtggacaaggggtaaggagaggtatatatatatgtgtatgtgtgtgtgtgcgtgtctttgtgtgtgtgtgtgttcatagagacagagtctccttatgttggccaggctggtctcaaactcctgggctcaagtgatcctcctgccttggaggatgccccacatcatagtgatgggatgacaggcgtgagccaccgcgcccagcaaggagggttttctaggcacgggagcagtgtgtgcaaagaggggggagctgtgtgcgtggcaggcactgcatttggtgtgcaaagaggggggagctgtgcgcgtggcaggcactgcatttggtgtgcaaagaggggggagctgtgcgcgtggcaggcactgcatttggtgtgcaaagaggggggagctgtgcgcgtggcaggcactgcatttggtgtgcaaagggggggagctgtgcgcgtggcaggcactgcatttggtgtgcaaagggggggagctgtgcgcgtggcaggcactgcatttggtgtgcaaagaggggggagctctgcgcgtggcaggcactgcatttggtgtgcaaaggggggagctgtgcgcgtggcaggcactgcatttggtgtgcaaagggggagctgtgtgcgtgtcaggcactgcatttggtgtgcaaaggggggagctgtgtgcgtgtcaggcactgcatttggtgtgcaaaggggggagctgtgtgcgtggcaggcactgcatttggtgtgcaaagagggggagctgtgcgcgtggcaggcactgcatttggtgtgcaaaggggggagctgtgcgcgtggcaggcactgcatttggtgtgcaaagaggggggagctgtgcgcgtggcaggcactgcatttggtgtgcaaaggggggagctgtgtgcgtgtcaggcactgcatttggtgtgcaaaggggggagctgtgtgcgtgtcaggcactgcatttggtgtgcaaaggggggagctgtgtgcgtggcaggcactgcatttggtgtgcaaaggggggagctgtgtgcgtggcaggcactgcatttggtgtgcaaagaggggggagctgtgtgcgtggcaggcactgcatttggtgtgcaaaggggggagctgtgcgcgtggcaggcactgcatttggtgtgcaaagaggggggagctgtgcgcgtggcaggcactgcatttggtgtgcaaaggggcgagctgtgtgcgtggcaggcactgcatttggtgtgcaaaggggagagctgtgtgcgtgtcaggcgctgcatttgtggcttaatgctgccattagagattgccatgaacttgatggcttagaacagcagaaatcgatgctctcgcagtctgaagaccagaagtctgaaatcaaagtcccagcccctccccaggctgccggggcagagttcccacttactcccctctttcagtgtctggtggctccaggcattccttggttggtggcagccccagtccaaaccttgcctctgtcttctcttctgtctgtgttttccccctttctctttccatagggacacagcattggatttaggacccaccggttaatcgacaatgatctcatcttgagacccttcatttattcacatctacaaagaatgttttccaaataaggtcacattcccaggtcccaggaattagaatctggacataccttgtgggggggccactactgaacccaccgcagggagctagaaggagtccgatgtcacagggcaggagaataggaccctggagaggtggagcaggtgcagaccacaaagggccttgagctgaggagcggggctgtgtccctaagtgaatggggggcaacacggtctgatttgtgacccggctgctgtggggagggtgctggaattgtccttgtaagagttggtgagggtggggaggagcggggatgcctcacagtgcaggagatgaggggcgggaatgtggaggcatctagaatggctcccaggttccctacgtgtgtggtctttgggaaaaggctgcgtttgaggctcctaaaggtggagatgcccaggagtctgcagacctgacttcttccgggagcaggaacacaattcgggagaggaaggtgatgcgaggttgatggaagctggcgagtaccagtccctgccaccaccaccattttatcatgaacaattgtaagcacacagaaaagttgaaagaattcacagtgaacacccattcacctgctgtctaacgttcccagtgatgatttttatgcgcttgctttatcacacagctgtccatctttccatccctctgaacatcatcattccatcttggtttttttgttgttggttggttggttgtttcgagacagagtctcactctgtcacccaggctggcgtgcaatggtgcaatctcagctcatcacaacccccacctcccgggttcaagcagttctcctgcctcagcctcccaagttgctgggattacaggcacccgccatcgcacccagctaatttttgtatttttagtagagagggggtttcaccatgttggccaggctgttcttgaactcctaacctcgtgatccacctgcctcggcctcccaaagtgctgggattacaggtgtgagccaccgcgttcagcccatcttattttttatgtatttcggagtaagttgcagagagttgtacacttcactccagcatgtcactcactggagcccaacatttgctgaagtgcatgaatctttttttgttcttgtttttgtttttgtttttttgagacggagtcttgatctgtcgcccagtctggagtgcagtgtcgcgatctcagctcactgcaagccccgcctcctgggtccacaccattcttctgcctcagcctcctaagtagctgggacaacaggcgccaaccaccacgcctggctaatttttttgtagccagtatggcttcaccatattggccagtatggtcttgatctcctgacctcagatgatccgcccgcctcggcctcccacagtgctgggattacaggcgtgagcccctgtgcctggccctgtcatctaggttttaagcccctcgtgcattaggtatttgtcctaatgctctccctccccttgccctccaccctccaacaggccccagtgtgtgacgttcccctccatgggaacagcaatttttaagggatgggtagagaaagaagatttcaccaaggagcctgagaaggacggtgacagtcagaggaaaagcaccgaagcggggacgtcagggaagatcacctgggtcagttaccttaggtttgactgcagataatagaaaaaccaagtaacagaggctcaaattgcatttggcactttttctttcttttatgtaaaaacgccccgaggtagaccttcctggggtgggctccactgtgccctcagtgacctggactcccagcttgtgaaaacgtcccgaggtagaccttcctggggtgggctccactgtgccctcagtgacctggactcccagcttgtgaaaacgtcccgaggtagaccttcctggggtgggctccactgtgccctcagtgacctggactcccagctttctgctcagctgtcttcagtggtggcttctatcctcagctcacctcatggttcaggatggctgctggggctccagccatcccatcaactctccaaaccagcaacagaaggaggaacaagggcagtgtggatagtgtacctttcggctaaatcagtctcttccagcagcttcctgcaagttccacacatatccctgtaacatcttgttgtctagaacgtaatcatatggctcacaccatcaggaaaggtgtctttgaactagctgctgggtgcactgccgctccgaatacagtaggatttctgttagtcggcggggaaatggatattggctgccagcagcctttgccttgtctgccttttcttcttttttgagatctggtgcccaagccgctgtctgctcagcatacccacctgtggccgtcggagactgaagcctgtgctcagtaggtccccatcttcctcccccagggttcctgccttctccgaggattggtttccccatcttttctgtaccccttttcctggttggagtctcctgggctctcatggttttgtgggggcagaaatgaaaggggaaggccctggaaatgttcgcaggccgagccctttcgccgcccctgggcctccgcccaccagcaccctgtcctcaggccccctgcgttcagctccatggtcagccccccttaaccaggagggatatggaaggggacttctttggagtgagattcagagggaaagggagggcatttgagacctgggttctgatcctgtgatcttcggcaattgtatgtaaattgggaaaaataagaactgcctccccgcggaacatccaggctggaaggagcaggggatggcagggcccgtggtcctctgctctgatcaggatgaactgtgcatgtggggagactggcagagaccttccctaccgtcccttcccccccgttgatcttggacgatctcccaagtgtgtggggtccattcctgcgacccctgggaattggtcagtgtacaggagagtctgcttggccggctggaatctaaactgtgggcaaagccgcggtccactattgcttattttccctggactccaggcaccaacagggcagcctggagcctcctggagaggaggagggaggagggaggggccggcgggaggctgccttccatcccctcctgtgcttctccagagtgagggggtgtcaccaaacggccaggcccttcacggacccagactcaggccagctgggtgccgctgtgcctcttcctcctccccctggaaggaccagagtcatttcacatcccttcagccacagacacaagtgtcatggtctccagggcactgggccttatgtcctaggtgcgtggcctacacacatctcagtgggagggcatcctgggtcctgcccaggtacgtggcgtacacgcgtctcagtgatggggcatccctgggtcctgcccgggtgtgtggtgtacactcatctcagtgatggggcatccctgggtcctgtggttcttcatacacaaccctgtctagggaaaaaactagtccatgtcccctggcagctgaatggggcattggctcagggacgaggagaggcagccgacagaagcaggtgcagcgagcctaggggaagcgctcggctgccaaaaggccagattgggcagagtgtggccacggccaggcgtcccggtgacctgttgacaccattctccagctgctggttgcctgtgggctggtgtgttgtgacagaggagggaagagctggggcccccgtggagaacttggctggctgggacttggctgaagcctcagacctgagacagacggtgcgatcctctgctcattcattcgctccacgcactttccccgagagcctgccacaggtggggttgtgggtgctggcgtacagtgatgactcagatgctcacctcctgccccaggggctcaaggacaaaggggcaggattcactaaggtgccagggggccaggtgccatggggagggtgacctggaggaaaggatgtctgggcagatggcagggcaggctcagccagcctcccccatcacactgtgcgagatccgaagatgcctggccagggagtcccgcccggaagatacccggggaggtttaacaagcggacgccgccactgggcagtccagtgcgtaggaggctcctgctggccccaaggctgccggcacggtgatcttcgtgtctccaggacgccctgcggtgccagctcccgctggcccgcacgagtgctgaagcttacccctgctctgcgatgagtgtgagaggggtgtccaccccccgctggcggccccagcccaaggaggtccaccacagccctcgggagcaacactgccacgttctccgttgccagtcgtggtgggtcagagctggggagcaaacaggccaaggggcaggggccggtttgtgggagggtccctcctatagccatgctggtggggctggacgcaggggcctttccgaggccgccctcgtaacccttttggaaaatgtgaagccctgagctgctgacctgcacaccccgctcgctgcactggctcagcctcccctcccaaggtgggtgggctccgtgcctgggctctggagcccaagtggtgctggcagccctggggggttaatgcggctcaacttcccggtcgcctttccttccctcctcctttgaaggaagcccacactggggtgatagaaataagcaccggctccgaggagtctgctgtgagcccctgtccctgccaggcctgggcacagcctcctcgcccacgccctgctgccttgggctccgtcctccgtgcggggccttgttctgagggctgagggctcccctcccacactccagaacctgccctggacccctggagggagtgggctcagtacaaatggtacccaaggaggagggccacaggaagtgacatcgaccggccccccccacctccttattccctataaaaagcaaaatggtgactcagagaggagagttggaagcgtcctgcctcttgctcccactgttaatttttacacttggaattaggcagaaggcaaagaaaacagcagcttgaaatacgcggctgacatgctcttcatcgggtagcaacagcagagccgctcctccccgcctcccagcagccccggagcgggcagggcccggtgcctgctggctctcccccgcccctcaccaggcccaggcccccgcacagcccccgcccgggccaggcgtggatggtgcggccggggccatggctgccgggggccgccgccggcgcccactacgctaccagtccctggcagctctggtggaggattctcagtggcctttcttgttccttgtctcagacttcagctacgggacggacgagtacgacggagaggggaatgaggagcagaaggggcccccggagggctcagagaccatgccgtacatcgatgagtcgcccaccatgtccccgcagctcagcgcccgcagccagggcgggggggatggcgtctccccgactccacctgagggactggctcctggggtaggtacaccggcttttctttctgggtttggggaggggtgacgggaaggcctgggcatcgtgggccaggccctgcttgggttggtctcgagagattgggactggagacgtttggacctggccgttcttggtgcctcgtcatctcgtcctggccctggacccctctcaggctcgggcttccctccccacctgctttgccaacgctgccgcccctgtctctccccgtctactagccgtctgctccccaggcctcccagacccctccgtgcctctttcagctttcccctgttagcctgtctcctccagaggacccaggagaggaccaggctctcctcccctctgcacccaggccaggcagtggctgcatgcgtggcccgtgggctccaggtgttcagatgctgctcccgcaaagccagcctgggcctggtgctccctgtgggtgcaatgagctgcccgctccagccctcctctgttcactctggaagggaacaaactctgatggcatccacctctccttgttgacagagacaagagttctgctccagagagaagcattgtagaaggaatattaagtatgtgctctgagacaggccagggatagaaactgtggagggtttgcggtccttgtcattaacgtgttcctggcgacagggactgacgctgtctgagcgcagctcgtgtgtgcctgtcggagacacatgaacgagcaaaacagaggttctgggggttgtttgcctggagctggtgggggagaagaatccaagccggtcctctgtggggggtgtgtgttgcaggaggcggtgggagtgccccatccttgcttggtcctgctcgtccgggtgtgttttgtagggggtctccgtcctgccttctgacgtccccagaggagcagtcgctgagatgccacgggctgcctcttcttcctccaggggctagtgcccccccaccccagctgaggccgcctgaaccctcccattcttgagaaccccctgctccttccagcccccccggccaccctccaccccccacagagctctcacccctcttcacacaccggggtggctgttatagcctttggcaacaagggccttggcaacgggcttcccacttgggggaagccacattgctgccatggcaacagaggccgaggccgagtttagcggcagtccaggcgtgcacctgtgggaagggctggcggggggcaggtgggaggcaagggggccggcgagggggttggtcagtgtgttgttgacctgccctaagacgggaggcgggttagagacaagcgtctcggacctgcgggggcagggtttttgccctggttctcctggaggcattgggctcagggtacaaatagtaacccaaggaggcagagcaggtgttcagggacctgaacgggggccaaccaggggagagcaaggaggagaagactctcgctcccatctctgccttcagctctcaaaccacagcagggctcagagccccgcccggggggactcagctctcaccccactgtgagcagctgcaggaagatgctgcggaatcccggtgtggggccagggtctttgccgctgcctgtccccgcgccacctccctctttgctccctgtccctgtgccctgtccttgtcgcgtgaccaccatgactggtttccgtgtccgtcgattttccgattcctttggtgctggcaggtgccttctctcgggagacagatcacgggcgtcacgcacagatgcccccgcctggcgctccggggcttcggggcagaacttgacttggtggctgtgcgtcttgcttggtggctcacgagggactcacttggcttgaggaccttgaaatccagagatgctagagtgactgccccctaaagtgcttgtggcccccagggttgatgtttacaccatcgactagaagccacgcaaggcaggagtagggagcacttgtccagcctggggatcgtccgggcaaaggtcccatccgcggcacctgccttccctcctcagggagcgtttctgccctttctgctgggtcaccggccccacctagtggactctgcagggattgctgtttacacggggtgcctggagggagctgacgcctcttcctgagtacttggggatgttttggttaaaaacactattaataaaagaccgaggtttctgcggcttggctgtgcttatttggccaaacaggtcccctcccctaccaggcttcctgctggggccttgggaacaggggggacttctggaccaaatcagacaattgttgtagatattcagatatctggcttctggcaccgccttatcgctgggccttccacgcccaaatatgcagccaacgggaagcccaaggttgagtctttgtgttagtcagtgttctctagagaaacaaaaccaacagggtgtgtgcgttatctgtatctatatctacatacgaagaaaagtattagaaggaattgattcaggtgattatggaggcttagaggtcctaatctctgcagtcaatagctggagacccaggacagccaatattggttccagtccaagtccaaaggcctgagagctaggagagccagggatgtaaattccagctcataagccagtggactcgaggctcaggaagagccagtgtttcagtccgagtctggaggctggaggaggccaacatcccagctcacgctcaggtagtcaggcgagaggagcttcctcttattctgcctttttgttaattcaggtgttcagtggattggatgaggcccacctacactggggaggagtctttttactcagtccaccaatacacatatcaacctcatcccaaatgcctcacaaatatgtccggattaatgtttggacaagtatctggacaccttgtggcctagtcaggttggcctagaaaatgaagtgtcatactattattccttcagccacccaggatggaaagcagataagctttgcgcagatgaaaatctattactctcaggctgggcgcggtggctcacgcctggaatcccagcactctgggagactgaggcagccagattacctgaggtcaggagtttgagactagcctggccaacatggtgaaaccctgtctctactaaaaatacaaaaattagccgggcgtggtggcacatgcctgtaatcccagctactcaggaggctgaggcgggagaatcacttgaacctgggaggtggaagttgcagcgagccgagatcttgccactgcgctccagcctgggtgacaaagcgagactccatctcaagaaaataaaagaaaatctactctttagctgtgagacattgggcaagtgtcctcataccgctgagcctcagtctccttgtctctagatagctctaactcccctgaaaggtagtggggaggaggccccactgtgagcagctctcagaccacagcagggctcagagccctgccttggggactcagctcccatcccactgtgagcagctctcagaccacagcaaggctcagagccctgcctgggggactcagctcccatcccactgtgagcagctctcagaccacagcagggctcagagccctgccttggggactcagctcccatcccactgtgagcagctctcagaccacagcagggctcagagccctgcctggggggactcagctcccatcccactgtgagcagctgcaggaagatgctgcggaatttcagcatgaggggaggcctgcagcattaggcctggctcaccaaagtgcacagcccttggccaccagggcccacaagacttttctcgccaggtttagagggctggggagccaacagcattaccactgcaaagaccaagtctgatcaatatctgctgcaccatgaccgaacctgcttttgcaatcaacctcctttctgccacatggggtggccccgggtgaagccgggtctctgcggtgttggcaggacatgctcctctctccccagcacgcccttccacagccttgcactctgcctttgtcttcttttgtgtccccaagacatggatcccacagaggtattagggtgaaacctgaagccctgccccataaaccctgcccaagtccaggctgagcagggcagcacggcagggccaggcccacagaccacgggtggctccattcagcggagactgcccagtttcactctgagaagaaagggccaggactcatctcagctgacaagtgggggtgtaggttcctaaggcaggaccatggtcttacagaaaacccgcctccccacaggccacagactcctctgtctgcttgcctcttgggaagcttagtaaaaaggggctacaaggcagagagaagaactgggttttgtccccactctaccactgtctcactgtgtggcctgaggggtgtcactcatgactccccaccagagctgcagtttgctcatctgtagtgtgaagacactgagaatttcctccctcctgacctcacagggctcaaacctcacagctgttgtgaggtttctgtgagatggtgtttggcagaatgctttgtcaatgtaaaatcgaaacaggggattagactccagcctgcaggagaacccaaagataagggtggaggcgaattgaaatcctcaccattggccgggtgcggtggctcacgcctgtcatcccagcactttgggaggccgaggtgggtggatcacctgagatcagtagttcaagaccatcctggccagcatggtgaaaccccgtctctactaaaaacatacacaaaaaattagctgggtgtggtggcaggtgcctataatcccagctacttgggagactgaggcaggagaattgctagaacccagtgggggcagaggttgcagtgagctgagatcacgccattgcactccagcagccagggggacagagtgagatgccatctcaaaagaaaaagaaaaaaaggaaaaaaaaaatcatcatcattgtccctatcatcctcttcctcctcctccccctcatcacagctgcttagagaggcttgtgctgaacctttcacgtgttggtttcatttaagagccccaacaactctatgaggtaggtgctataaccatctccacattacaggtgcgaaaactggggctcggagaggtgacgtaatttgcctaagattagctgggcatggtagttcactcccataatcccatctacaaggggaactgaggcaggaggatcgcttgagcccaggagttggaggctgagaggtgctaggatcacgcctgcgaataggcattgtaccccgcctgggtgacagagcaagactccatctcttaataatagctattaatattattgtttgtccaagaccatgcagccagtggggcagcgtgttattgaaacttgggtttctatgatgccagagcctgcacagcgctgtcaggtcccgctcacacgccctcccttgtgaagctttcacacccaccccgccgctgatcctactgcagtttgggaggtgtgcacggtcacttgtggggtgcatccgccctgtgagatcaggaccttaatccctgatcatctctgtggaccccagtggaagcttcttggcacctaggggttctcaactggtatttgtggaatggaaccaagtagttctgggatgttcagtcaggaggaagggaggagcaaggaaggctcaggcaataacgctgggaagaactcaggctcagggataacgctgggaggaactcaggctcagggataacgctgggaagaactcaggctcagggataacgctgggaggaactcaggctcagggataacgctgggaggaactcaggctcagggataacgctgggaggaactcaggctcagggataacgctgggaggaactcaggctcagggataacgctggggaggaactcaggctcagggataaagctggggaggaactcaggctcagggataacgctgggaggaactcaggctcagggataacgctgggaggaactcaggctcagggataacgctgggaggaactcaggctcagggataacgctgggagaactcaggctcagggataacgctgggagaactcaggctcagggataacgctgggaggaactcaggctcagggataacgctgggaggactcaggctcagggataacgctgggaggaactcaggctcagggataacgctgggaggaactcaggctcagggataacgctggggggaactcaggctcagggataacgctggggaggactcaggctcagggataacgctggggaggactcaggctcagggataacgctgggaagaactcaggctcagggataacgctgggaggaactcaggctcagggataacgctgggagaactcaggctcagggataacgctgggagaactcaggctcagggataacgctgggaggaactcaggctcagggataacgctgggaggactcaggctcagggataacgctgggaggaactcaggctcagggataacgctgggaggaactcaggctcagggataacgctggggggaactcaggctcagggataacgctggggaggactcaggctcagggataacgctggggaggactcaggctcagggataacgctgggaagaactcaggctcagggataacgctgggaggaactcaggctcagcgataacgctggggagaactcaggctcagggataacgctgggaggaactcaggctcagggataacgctgggaggaactcaggctcagggataacgctgggaggaactcaggctcagggttaacgctgggaggactcaggctcagggataacgctgggaggaactcaggctcagggataacgctgggaggaactcaggctcagggataatgctgggaggactcaggctcagggataacgctggggagaactcaggctcagggataacgctggggaggactcaggctcagggataacgctgggaggaactcaggctcagggttaacgctggggagaactcaggctcagggataacgctggggaggaactcaggctcagggataacgctgggaggaactcaggctcagggataacgctggggggaactcaggctcagggataacgctggggaggactcaggctcagggataacgctgggaaggactcaggctcagggataacgctgggaggaactcaggctcagcgataacgctggggagaactcaggctcagggataacgctgggaggaactcaggctcagggataacgctggggagaactcaggctcagggataacgctgggaggaactcaggctcagggataacgctgggaggaactcaggctcagggttaacgctgggagggactcaggctcaggcaataacgctgggagggactcaggctcagggataacgctgggaggactcaggctcagggataacgctggggagaactcaggctcagggataacgctgggaggaactcaggctcagggttaacgctggggagaactcaggctcagggataacgctggggaggaactcgggctcagggataacgctgggaggaactcgggctcagggataacgctgggaggaactcgggctcagggataacgctgggaggaactcgggctcagggataatgctgggaggaactcgggctcagggataacgctgggaggaactcgggttcagggataatgctgggaggaactccggctcagggataacgctggggaggactcaggctcagggataacgctgggaggaactcaggctcagggataacgctgggaggaactcaggctcagggataacgctgggaggaactcaggctcagggataacgctgggaggaactcaggctcagggataacgctgggaggaactcaggctcagggataacgctggggaggactcaggctcagggataacgctgggaggaactcaggctcagggataacgctggggaggaactcaggctcagggataacgctgggaggaactcaggctcagggataacgctgggaggaactcaggctcagggataacgctgggaggaactcaggctcagggataacgctgggaggaactcaggctcagggataacgctgggaggaactcaggctcagggataacgctgggaggaactgcagcctcttcttccctttcttggtctcttcagaaggcttagggcttgggattcgaggttgctggtaggtgcgtgaagaggcggcatggcagccaggaactcctgagatggtgcctgctccactccctcctgactgctccggacctgggttgtgtggttcagggactcctcgagtttcagcctccgccccccagcagccggcccctgcatttctccccttcctggatcttgggtccctgctgcaaagagaaggacacgagctggaccctcccgtgtgccaggtgctgtgctaggagcccaggggctgccctgccacccaagtcctccagccatggggctgcccccgtttagtagatgaagacactgaggctcagggtggctcctgggcttgtcccagttgggaaggaggtaagtcggaagtaggtagactagtgccttggttgtgaccctgggtcccgtcatcgctggctcccgtcctctctggccctcctacattcacacctggctgggatcttgctcacctctgcatactgttaatcttccctgatgaaccacacctggctggcctggctcatcccacagctctcacgccctgtctgggatctccgtcttctggctagctagcagccctagagttgatgccgtaattacccccattctatagatgaggaaacggaggcacagggagactagatgacatgcccaggtcacacagttggcaagaggcagagctggggctcacatccagagtgcaggggagttttctttctgttttagtttatttgtttcactgtataaacagtgttgtgtaccggcttctcctcaacattagctttattttattttatgtaatttatttatttgagatggcgtctccctctgtcacccaggctggagtccagtggcgcaatctcggctcattgcagcctccgcctcctgggttcaagtgattctcctgcctcagcctcccaagtagctgggattacaggccaccacatccggctaattttgtatttttagtagagatggggtttcatcatgttggccaggctggtcttgaactcccaacctcaggtgatccgcccgcctcggcctcccaaagtgctgggattacaggcgtgagccacctcgcccagcctatgtattttatttttttgagacagagtctccttctgtcacccaggctggagtgcagtggtgtgatctcggctcactgcagcttccgcctcccggggttcaagtgattcttctgcctcagcctccctagtagcggggattacaggcacccgccagtacgcctggctaattttttgtatttttagtagagacggggtttcaccacgttggccaggctggtcttgatctcctgacctcaggtgatctgcccgcctcggcctcccaaagtgctgggattacaggcgtgagccactgcatctggccaacattagctttatgtagttgaactatgtatatgattttggagtgacctgtactagaacagagaggaggcagagggaggagcaaggtgatctggaaggtgacgaatccagtcccatctgtggctgcagttagtggctgcaactgccctggcacttgccctttggtgtcagttcccattggctgaagagctactgagcttcatacagtctggaggtggggcttgagtttctgccaggaaagctgggagagccagggagaagccaagaggcgggagaaagtgcttcaagccgaggacctgccgttgttaaaggcctggaagtgagaacgtgccaggccctttgagaggttactgtcaacagtgagatgggtgagtcatcagctggggccccacggctcttgtttgggctggcttggtggcttcctgctgggcatagagtgagcagtgttttagaaagagtcatctgatgtcagcaggagggatgcaggatgaatgtcctgtcacacctgtcctgaaatcctccagcaccttcccttcgcctatggggccccccttccctttgcacagctgtcaaggccttgtgtgacctgacccctggaccccctgcctacctctgtggcctcaggaccaactccgtgctagaattgtgaactctcacgagagagagattttgtcggttttgtaacaaaacttgctcattgcagtctctggtgccgagaactgtgcctggcacacagtaggtgctcagtaaatattagctgaatgaatgcatgaaccagccagactaaactcatgtcattgtgcctcacatagtctctctcctgtctgttccccagccccaccagcatctctaaccactgctttttttttttgagacggagtctctctctgtcacccaggctggagtgcagtggcgcgatctcggctcactgcaacctccgcctcctgggttcaagcgattctcctgcctcagcctcctgagtagctgggactacaggcgtccaccaccacgcctagctaatttttgtatttttagtagagacggggtttcaccgtgttagccaggatggtctcaaactcctgacctcaggtgatctgcctgcctcagcctcccaaagtgctgggattacaggtgtgagccactgcgcccggccataatttttttttttttttttgagacagagtcttgctctgtcgcccagactagagtgcagtggtgtgatctcagctcactgcaaccactgcctcccggattcaaggaattcttgtgcctcatcctccagagtagctgggattacaggcctgtgccacccctcctggttaatttttgtatttttagtagagacagggttttaccacgtagaccaggctggtcacgaactcctgaactcaagtgatctacctgcctcggcctcccaaagtgcgggattaaaggcgtgagccactgcgcccagcctaattttttttttttttttgagacagggtctttctctgtggcccagtctggaacacagtagcacaaacacagttcattgcagcctcaatatcctgacccaagcaatcctcctgcctcagcctcccaagaagccgggaccacaagagcatgccaccacactcagctaattattttttaaaatttttatagagatgaggtcttgccatgttgcccagctggtctcaaactcctgggcttgagtgatcctcctgcctcggcctcccgaactgttgggatttcaggcgtaagccactgcacccggcctatatgtatagtttattcgtggacacaaataaggaaaaatgtataactaactcttagaggctccctctgtcagagggaaccagaggagactttctctttctttattatgtgtgtctacagagttagaattgttagtgatgtaacaggaaaataaagaagttaaaatagaagtgccacgattgggaacgtagagtgggctctgagggcaccagcgggcacatctgacgcagccaacggggagtcacgggaggctccctggaggaggtgacgtttaaagtcgaatctaaaaataagcagtgggccaggtgccgtgtctcacacctgtaatcccagccctttgggaggccgaggcgggtggatcacctgaggtcaggggttcgagaccagcctggccaacatgatgaaaccccatctctactaaaaatacaaaaattagccgggcctggtggcgggttcctgtaatcccagctacttgggaggctgaggcgaaagaatgggttgaaccgaggaggcggaggttgcagtgagctgagatcatgccactgcactccagcctgggtgacagagcgagactccgtctcaaaaaaaaaaaaaaaaaaaaaaaaaatcgcaataggtgtttccatgttatcccttccagaaaagtggcacctcagctgcagagttctgacactgctcccctccccagtacggccttgcccctcccttgacactgccttgggagtcagtcaccaggtcaatctgtccctgagactgtcagctccgcgagggtaggcacggggttccctgtccatggctgcattccgatgctagcacactgcctggtgcacagcaggcggctaacaaatgcttgctgattgggtcaggcggttaacaactgcttgctgattgggtcaggcgttaacaaatgcttgctgattgggtcaggtggttaacaaatgcttgctgattgggtcaggcgttaacaaatgcttgctgattgggtcaggcgttaacaaatgcttgctgattgggtcagggaaggagggaatggagggtgggtgtgggggaagactgtggggagtcaaccattggagactgagatttagacttgatggtgtcagaaatctcagtggctgcgaaagatttcaaacagtagctaggtgtggtgtgtgcttatgcccctcaccctccatgatgctgttcagcccacttctccaagttcatcttctgtcctctagcaagcagcgcttcttaacctgccttccttcctctcttccttccttccttcctccctccctccctccctcaagacagagtctggctctgttgcccaggctggagtgcagtggtgcgatcatagctcattgcagcctccaactcttgagctcaaacgatcctcccacctcagcctcctgagtacctgagatttcaggtgcgccactgcaaccgggttgctgaagctgcttaaccctttcctttcgggccttctcttctttgcctggaaacccttccctatttccagatgctactcagaagccactgtcctgtgaagctttcactctcaggcagcgttagtgccactgtcctccatccccagggtggctggtaaacgagaacactgcctcgtgtgttcacacgtcctcaccccagacggatcgagagcctgagaacggcaagggccccgtctcccagcctcgtatgtgtgccatgccaggccttttctgggtatgaatgaatgaatgaacagacagatggacagacaagatcaggagccaaagtggggaagtacgtgtggtcgtgtgggtgtaagaggctctaaagcttggtggggtggtggctttggcaaaggaaaagaagaaccgaaggacttggtaaaagggatgtgggggttgagggaaggaagactcgtaagatggcggccgcactaacagaagtggaaacccggaaggggaagctgtttcagaaggaggaagggtcctttggtccagatgtgtggagtggaagggccgtggctgggcttccaagtgaggagacccagtggccggggcaggtgctagacctagagcccagcaagacaccagggctgcagctggcagcgggccaccactggcctggaagggagaagggctgcttctctgggggaagggagcagagggctgaggctgggcccaagcaagtgactccacatttacaggaggcgggagaatgaagggccagcctacaccagagagtggtcggggcagtgcctgcatcaacagggcagctgagggcttggagaaactctagactgcagaggccaaagagtcggagagggaggcctctggctttggaataaaccgtttgggggggcctttgaagcaggctgcttctatggagaacattaggagccaggccgaggcagatggagtgtggagctcaggtccagggctggctcagggcatttgtcagggaaggggagggaagctgtggggactggtgagtcacttcccctccaggggggcaccgagggcctgtgagtggagtctgtgtctgatggaggggcactctcattactcactggaatttccagccaccggggacagggtggagtagagaggccctggatactcagggagtcacttgtgtggggttcagggattttgggaagaagtgggcgtcagtctcaccatgccgtgtagaggtgtggggaacggggacgaggatatcctggcagacttccaagggcacctcatgtcctcttgagtggaggaaggaacacagcaggggcctgtggggttttaggcccttcttcgtgtcacctgcaggtctgactcatgtgggcagcccatgccatgcacttggagcccgccgggcgggagacagaagaacccgtggtaccaggccctgagctggcatacttgtgccctggggaatgccaggcctggtcgttcccaagccctcgccacagcctcacccgcccgcaccaaatgaggaattgtggctgaaagggcccttcagatgcgccctggctatttataacccacccaggcagggacaggggaaaaccaggggctggaaggagatgggtggggtgggggtgtgcctctgttgaaccctggtggcacagttccctgatcaaaggctgttagccctggggcccctcaagggctcaccccgcaatcccctgctctgtatttcagctctgcaacaggatggagcctctctccagggagggcagcttctctgctgccaatggaattgcatgagccccacctagagcccagagcttctgaagaattctggggggagtggggggctgtggcctgaactcgggccacaggtgtggttcatttagacggcaccatgttgttttaaaatgttaattatttgccatcgttttaaaatcaggagcattcctgttaataagccagattttagcttattttgaacagagatcaggcagccatgagcttgcgtttcctccagcagccatcggctggagtgagtggtggtttcaccctgccctacctggctcgcttcaccggctggcctcacccgcaggcctcacccgcaccctcatgggtgccgtttgcaacctttgctccatcgttgggttgtaaaagagcttttcccagggcctcctctggactcctcctcccatggaaggaggtgtatgtgcatctgggaactagggccagggggaccagaatgtggcctcactccctgcacagttgggggttctgcaaccattggagaagccaggggaagctggctgggagtgggcagggccggagatggtgcctgtcctgggttctgtgtgcactccccttgcaggatggctccctgcggtggggtggctgggggggctgcttggaggaggtgggggtgctggtctcagcagtgcctgtgagtaggtgggaggctgctcagaggaggtgggggtcctggtctctgcagcgcctgtgagtaggggggctggtctgtgagtgggggggctgctcagaggaggtgggggtgctggtgtcagtagcgtccgtgagtggggggactgctcggaggaggggggctgcttggaggagggggatcctggtccctgtgagtgggacgcccaccgctcctgtgcaggacagtggtggcgccgcgctcctgcctgggggcaggtcaggcctgtctgttgcaaagcctgactcctccagcggcggcgggacgcggctgtggcttctgggcgggccggggcctcccctccggaagggggctccggcgcatggggactccggggtggctctgggggtcgcccctgctcgccgggctcctggctcggccgcgcgcggggaatgaagatgcgtctgggaagcggcctccccgctccaccccaccccggcccggccgcggcctcctcgctcctcctccgccgcagaagcctccgccagccgcggccccgcaaccccagaggacgggcggctccacctcgcgacgcgcgtttcctgtgtgttcggagcgagcgcgagcccgagccccggagcccgggaagggcgggccctgcggggccgggcgggacacggaggagggcgctgggctgctgtgcggcgggttcgcctccgccacgggccgggcacggcgtcaggggctgcccgggccttgctccccctttcgccgggcgaggacgcgcgaggcggcggcggcggcggcggagcgggctggactaggtccgggatgcagtcccgggtcgggagccccaggccgggcgcgcgggtgtagacctgccccccctcccgcccgcctcctccctcctccctcctcccgccgccgctgcgtggaccccgcttcctgtctgccctccgcgggctccggctgccatggaggaggaagaggaggcgataggcttgctggacaaggttctggaggacgaagatgtgtttctcctggaggagtgcgagctgggaaccccgaccagccccggctcagggtcccccttcctggtggctgtgaaggtgggagcgtgacacgccctgggcgctggggggggccgggccggcgctgccgaaggtgcgcgggagaaatggctgatgcgggcgcagagcgcgcggccgggtggaagccctcggcggagggtcccggccccggcagctgttcccgggggagaggggcgggcctgcctccccgaccggtgtcctcggggcagtggtggccgccccctccaggccagcccagctcagggctccggcggctgtgccaggagtcacctggcgcgcctgtcagcccgagcctcgccgcctccctggagcgggtgggcaggaatcccccgtttccacggcaaccgcaagagaggggccaccctcttcccagccaggagacagggacttggtgtctccgagctgaggcaagagggtgtttgcaaagggcaagagccagaggtcactgagcttccttgaaggaaaagcactgggtcagctgaaggggggagggaacagctggcttggaggctgcagccaggtgggcaggtgcccttcccgaggcgggacaggcagggagcatctgctgggccctggcccacccgctctggggctgacggcgttctctgcagcagtgacccgtcctgtaggagaggttggctcccggtggaactggagggcagtggtggccagaatcccttgaggagcggggcggccccggaaccacgccggctctgtgagtctggcccggcacaccacagcggtcttcctttttctctcctggacacacctctcagagcttccacctcagccttttgctcagctgctctctggttctgtgtcgagaagggaggcccagtgaggatgcgtttcggggagtttgcagactgctaggcgaggctgcctaaccgagtgcccatcggcggggcctagaaggcatgtgcagccagcattgctggggacgggaggctgtccctgaacctctctgggcctccctgcccctcacagaagatggggatcacagtcctgccccacccactctacagtgtggctctgaggaggagccaatggaggtaaaaatagatgcagaaccacgggagatggctgatgtgtgagtatgggtggagcggtggctgcaggcctgggtggggagtggagctgtagggaggctggcagtggctggcaccccaccctgtcttctctgatctggtgctggcgtagggccgtgggggtaagtcacgtctccccgtgggctcagggaggcctctgcacttagggtctgaccagcctccccactaggaacagggtgggaaagtctgctcctgagccaggagtcaggctgggagtagcaatgctgggatgggaggtgtgtggccctcatgggcctcctctgggaagcccccagcacagatgtgggcccactcagaggctgcctcctggacctccccttctgctggaccccggcgtatgcctcagctaagcccgtatttcattctgctcagatgctcagaactctagacatttgcctccgcaattatatcccattctcctggaggaccaggaccatgtcatattcattgctgaacactgcacagtgcttggtgtggggctggtgcctgtgagagtctgcacaatgtgtgaggcccgctggggcccacgaagggtgcaccaggttcccagcctcgctccatctcagaggtgtcctgctgtgtacggcggtggcccacggatgccaagagagcctgagcacgtgtcacacctgaaaacgctgctcctcctgggtccccgtgagcaccgggatggtgtcttcccctctactttgctgccagcatgggggaaggagacctttctcgaatgccggggagttccaggctccctgctccatcctgaacacctctagaattcctccctcctctaccggcattggcctcagagggagaagacaagcaggtggccacagagcggtgggaagaaagctcctggattcattcaacaaacactctcaggttaggtgctcttcagagcaccctgcctggcactgtagagatgacaagaggaacaaggcgtgatcttccctcacaaggcgttcagagcaaggggcaggtacagggagtaggaatagagtacggaagtaggcagggtgggccagatgcggtggcacacgcctgtattcccagcactttgggaggctgaggtgggcggatcacctgaggtcaggagttcgagatcagcctgaccaatatagtgaaaccacatctctactaaaaatacaaaaattagccgggcgtagtggtgggcgtctgtaatcccagctactcaggaggctgaggcaggagaatcgcttgaacctgggaggcagaggttgcagcgagccaagatcatgccactgcattccagcctgggcgacagggtgagactcagtctcaaaaaaaaaaaaaaaaaaaagactgtgagaagagtactgataaaagggcaccaaattcaggggagaagggaccacttctagtggagttggggatggcctggatgcgtgcatgtgtgtgtgtgtgcaggccaagggtcatttctggatgatacactcctgtcctgggctgcagaggttcttggcacacccttccctggcagctagtaggaatccaaggcaattctctttgctattactttactttaggggtacttaccttaagcagcagttgcgttgtgagcatgtgcccaagtgccaggcccataaatcaatcctgtttccagtgtcatttccaagacgcttcatcttcctggggggcagaggtaaagttggctgcagttttctccaaagctatagctggagtttgctgcatatctcagcccagacttacctttgaagagttattgatctgtaaaactggtaatgcaaataaaatactgatagcagcgtcatgttgcatttgtaaaatggcttacacttgccaaaaatgtttcatgccattctatttaaagataggtagggttgtgacgggggcgttgtagaaggtgctattttaaggaacttatttgtcaggaataaaaacccttttgtaatgcagattaaccctttaggtatcattctgtgccatttttttttttcttttgagacagagtctcactctgtcacccaggctggagtgcgatggcacaatcatggctctctgtggcctccacctcccagactcaatcagtcctcccacctcagcctccccctcactacaggcacatgccaccacgttgggctaatttttatatttttgtagagacagggtttcaccatgttgcccatgctagtctgtaactcctgggctcaagcaatctgcccctcttggcctcccaaagtgctgggattacaggagtgagccactgagcccagcccaattctgtgccagtttttaatggatcatctgaaacatctctatttctgtttcacctgcccaggtctcttgtgcctgcacatcatgcctgtatcccccatttggatgtttttctaagtgcgggccccacgtggtgatttgagaaatgatcggtggcacctcgatctatattttgcattttaatggttaagtatatattttaatatatattagaaaaaatatgacctgtacatttttcttacgatttcaaatacgtgtagggtaagactgctttttacaagtcagttcttgggcgcagtggctcatgcctgtaatcccagcactttgggagactgggcgcggtggatcatgaggtcaggagttcaagaccagcctggccaacatggtgaaaccctgtctctactaaaaacacaaaaagtatctgggcgtggtggcgtgcacctgtaatcccaactactcaggaggctgaagcaggagaatcacttgaacccgggagatggaggttgcagtgagccaagatcctgccactgcactccagcctgggtgacacagtgagactctgtctcaaaaaaaaaaaaaaaaaaaaaaagttactgtaaagaacaatattgagtaaagaatagtgcaggtggtggtatgtgagtatggcaaaattttaagggtgggatatgaacaaccaaagtttcaaaacattgcctgtgccctatggtgcctgcctaagacctcagacagcaatagggagcccagaatacggggatccacccttcaggagagaggggccactggaatttggtctttgtcccccagcagttgacccgtcttctctgttctaaattctgccaaggaagcagctgaaagagacttcctcagcgcctagcgctgggagaggagagggtctctcgatgcctctacactgcctcagctgtcctgagactgagatgggccagttgtcctgaggttgatgcttggtgtgggtataagccccaggcacggccacccccacccccaggcccagtggcatctactctgagcagatcctgctgggtactcctggcagccagctgtggcccgtgaactgacttctaccgtctgtgaagcctcagaccctcgctgcatgccctatagccttgagtcgcagccagagagccagccctgcttgttgtcttggaggccagtgctactggagagattgtgtctttgcttggcctggaaccagatgtttggaggctttatttagcctctcaactctgtggaggaccaggcctgagctggccacgccttatctctagacattgttcctaccagagtgacctgacgtctttggtttggcggcttcaagctgccacactgtcagcctagcagattgtgcaggatgctgaggataaacgaacccaccaggactgcatttcacaagttctggctgggaggaagtgaggacaggcagcttcccggtgctggagacaggtaggcagcgtggcagaggctgtgggacctggaactctttagagaactcgctccggagcattctaggcacgtgggcacctctccttcaccttcgtattcccagtgcctggctcccggtgggaatgggtgagtgagtggtgagcctggtttttgatgagacaagagacgccctgcaaagactgaagaaacaatgtgaatttcctcatggctctaaactgggaattgtggagtctgaggaaagctggaaaagatgggagatggaacaggccttcctttggtggtgactgagcaacgggtctcctgttagccaagtgcaccgaggctaatttcccatccgtacgctctccaacgcctttgctccaatctcagccaaaactgcagcgtgaacggggcccagagcaggactcttggggctgactgttgcctcttgagggagggtcttcctgagttgtcttcccatcagaaccagcctttcaagagtggactatgaatggaagtcttgaggggaggatcttgcagaaatgggcgattacagggcttccagggtctatgctcgtgccaggggggatgaagcttgtttgtggctggggctgcaaatccctttcttccccccatcctagtccaaccagctctacagttacagctcacggtgtggcatttgctaaaccctcaggcaaaaccttggttggcagggaacaggagggagtgctagcccccagcacaggggatgagttcccatttgtcaaggctgggaagcagcaggaagacccctgagggtctgacctggaggggctggagctgggggctgttccaggctctgatcttgtcccccggggctacgtgtgctggaggctgtgcaggcctctggcagtcccgactctcggtgcctcaggaagatgataacacctgccaggttttgagactccggtgaattgaaccacaaagatagctaagctcagttcctggaatttgtgaagccgccaataagtaactattgcccttgcctgaagcgtggggtctgtcttgcttttctaatgctgctgaaacaaatcgccacaaacttaagggcttaaaaccacacaaatttattctcttatacagaaatctaaaaaggatctcggcccggctccatggctcacacctgtaatcccagcactttgggaggccgaggcgggcgcatcacctgaggtcaggagtttgagacgagcctggccaacatggtgaaaccccatctctactaaaaatacaaaaattagtgggtgtgatggtggacgcctgtaatcccaggtactcgggaggctgaggcaggagaatcgcttgaacctgggaggcagaggttgcagtgagctgagatcatgccattgcactccagccctgggcgacagagggagactttgtctcaataagtaaatacataaataaatagattaattaaaataaaaaggatctccagggctgcattgcttctggaagctctagggcaagcttttccagcctgcggccatacggcccaggactgctttgaatgtggcccgacacaaatttgtaaactcttaaaacattatatatttttcttttagttcatctgctgtcgttagtgttattgtattttatgtgtggcccaagacagtcgtcttcttccagtgtggctcaggggagccaaaagatcggaagcccctgctctaggggagtgagttcattttattgccatttccagcttccaaaggctctctgcattccttagctcgtggccccatcctctgtcttcaaacctaccagtgtagcatcttccaagcagtccctcaccactaccctgtctccccggccctctcactccccttctgtggccacgatgcctcagggaaagatggcattttaggcagcaggtaaagaacgaaccgaaagctagagacctttgaagatgaggaggctggttctcctgcgtgtgggggagactgagcgatgtcctggctgtgggaaagactggaagggtagggacgggcatccgggccactgcaggtggctcataaaggatatggtgggccccatgtcccagtctagggccgaatctttacttgttttttaaatgtctttccggcagggtgcggtggctcacacctgtaatcccagcactttgggaggccaaggcgggcggatcacgaggtcaggagatcgagaccatcctggctaacacggtgaaatcccggctctactaaaaatacaaaaagttagctgggcgtggtggcgggagcctgtagtcccagctactcgggaggctgaggcaggagaatggcgtgaacccgggaggcggagcttgcagtgagccgagatcgcgccactgcactctagcctgggcgacagagcgagactccgtctctaaaaaaaaaaaaaaaagaaaaaataaatgtctttcccactagagtctaagccacttgagaacaggggccactgtctgtttcccatggtatctatagggcctggtggacattcagtaaatatttattgaatgaataaataaatggacacatagcccagtggaatccccaagtactcgcgttttgcggtattcatactcggtccttggcaagcatcgggcaaggtggcactcttaggagttgaatccagctctggtgtgtgggacaggcaggaggagaggaagagagggaggaaaagtcggttcgagaacccaggtggaaaatagattgagggaagcaaaacgagatgttacaggaggaatatgggtgattgtcttttccttttatatttctgcatgttttgtatattttttataataatatctgacttttatcccctatgaaagtgtcgcttaaaataaaaggaaaggggaaaggggggccgggcgcggtggctcacgcctgtaatcccagcactttgggaggctgaggcggacggatcacctgaggtcaggagttctataccagcctggccaacatggtgaaaccccatctctactaaaaatacaaaaaaaattagtctggcataatggctgggcatggtggctcacacctgtaatcccagcactttgggaggctgaggtgggtggatcacctgaggtcaggagttctatatcagcctggccaacatggtgaaaccccatctctactaaaaatacaaaaattatctgggcatggtggcaggtgcctgtaatcccagctactcgggaggctgaggcaggggaatcactggaacccgggaggcggaggttgcagtgagccgagattgtgccactttacttcagcctaggtgacagagcgagacttcgtctcaaaaaaaaaataaaggtcgggggggaagggcagggaagcagaccgtccacgcagggttttggcctccttgctcatgagctgttggctgtgctttgcgtttgtgcaggtggaagcagggaaaggcctggagatgaggaagctggttctctcggggttcttggccagcgaagagatctacattaaccagctggaagccctgttgctggtgagtacagtccctgctctggggccttccggtccccccgcccgtgttgggtgatgtcatgctctgaagctgcttttggagttggagaggaaaggggaccgtacccgtccctccctgtggacagagtctgcagctggtctgcttctggctgggcatcgggcagcccgggtcattgccagaaagggcctgtgcctctcagctccagctctcaaaaggcaggagaagcacacccggcttagagatggcaaacacacctgtcacccacgaccctggcatagggcatcgtgaacccatcatggtgctctgcctgcctgggcgggggccgagcgccttctccacgctgtgctctgggcagtcattcccaatcaatccagttaagaagtctctgccgtcttgtgtccaagtccttctacctccctgggtgagggaaccgttagtgccatcctgaggccccgtgtcaggaaatatgaggtgggaggctgtgttctttttttttttttttttttttttaagacggagctttgctcttgtcacccaggctggagtgcagtggtgcgatctcggctcactgcaacctctgcctcccgggttcaagtgattctcctgcctcagcctcccgagtggctggaattgcacgtgcacgccaccagtcctggctaatttttgtatttagtagagacaggattttatcatgttggccaggctggtttccaactcctgacctcaggtgatctgcccgccttggcctcccaaagtgctgggattacaggcatgagccactgcgcccggcctgtctgtgttcttttgagaagcggcacagctctgaggcatcaggccaagctcagccctcggtaacatgcctcagttcccctcccagatggaggcatcgttgtgagagtctgattgggaggggaatatgaaaatgttttcggaagataaaagtactacacagatgtgaggtggttttgccttggaagaaagtgctccttagatgtgtctggatgttatgcagagtgatcgtggcgtgtcaatctttcttttgggtattttgcagcctgagacataaggtaattgtcagaaaagggagacgcagaagtgtggatctgtggaagctcattcttaacaagaattctaagatgcacatttaagtacttgccatgacgtgaggtgttgtcacacgtcaaccctgagatgctgtcagtgtcccaggggacttgacatttatgttacccaggaatgactgtgtaaatgtgcaggtgcaggccgggcgccgtggctcagtgcctgtaatcccagcactttgggagccccaggtgggcagatcacttgaggacaggagttcgagaccagcctggccaatgtggtgaaaccttgtctctgctagaaatgcaaaaaaaagccaggcgtggtggtgcatacctgtaatcccagttactcaggaggctgaggcatgagaattgcttgaatctgggggcgaaggtcgtagtgagctgagagtgcgccactgtactccagactggacgacggaagtgaaattcctcaaaaaaaaaggctgggtgcagtggctgacacctgtaatcccagcactttgggaggccgaggtgggtggatcacctgaggtcaggagttcgagaccagcctggccaacatggtgaagccccatctctactaaaaatacaaaaaattagctgggcgtggtggcgggcccctgtaatcccagctactcaggaggctgaggcaggagaatcgcttgaacccgggaggtggaggttgcagtgagccgagtttgcaccattgcactccagccggggcaacaagagtgaaactctgaatgtgcagctgttttgccacacgccaggctgagtacgtcccatctctccaggagtttatctgtgtgtacggagctgttttccaagtgaggggcagtgtggcaggtagctgagggtcctggtctggggccagagctagggcaagacttggccctgccattaagagcaggcgtattgcactgtttctcaaactgtgcctctcagcccatcagtgctttgggttgtgaaatcagtacagtgggttgtgaaaccagtacagtgggttgaaccagcatttttaaaccaatgaaaaaatgtcagcatgcatcatacacgggaaagataagtgagggaactttcggtttgttgtctgtctgtgtgcctgtatatatatgtaattgccgggcccatggtgtcttacacctgttgtgggtttgaaaactgctggctttggccgggcgccgtgtctcaagcctgtaatcccagcactttgggaggctgaggtgggcggatcacaaggtcaggagatccagaccatccttggccaacacggtgaaaccccgtctctactaaaaaagtacaaaaaaaattagccgggcgtggtggcgagcacctgtagtcccagccactcgggaggctgaggcaggagaatggcgtcaacctgggaggcggagcttgcagtgagcagagattgcgccactgcactccagcctgggcgacacagtgagactccatcacaaaaaaaaaaaaaaagaaaagaaaactgctggctttgggcaagccctacataaattccttgagcctccatttctggatctgaagatgagagggatgccattctttctctctctttccatggggttgagaagatcgggagatgctttcgggacctcatacagcgttgagttacttaagacactcaactgttagtggaagaaaggaggacaggcaaagagacaacccgtcagacattcgtgaaacacgtcttccaaaccgtgaattgctgtccaaaaaggaacatagttgtcattactaacagggtgtgtatttgaaaggagttcagacagaggatctagactgcctggccgtactggctccaggctttcagcaggtgaatgagctatcgtgcctcagtttttccatctgcaaactgggtatacaaatagtatgcttttcatggggtcgttgtgaggattaaaggaatttatacacagagttctttttttttttttttttttgagacggagtcttgctctgttgcccaggctggagtgcagtggcacaatctcggctcattataacctccgcctcctgggttcaagccattctcctgtgtcagcttcccaagtagctgagattacaggcacccaccaccacgcccagctaatttttgtatttttagtagagatgagatttcaccatgttggccaggctggtcttgaactcctgacctcaagtgatccgcccgcctcggcctcccaaagtgctgggattacagatgtgagccactgtgtccggcacataaagctcttagaacacagcctgagtgttcgttgacactgttaatttctctattgctgggagaggagacaggttagggcttcgtggtttctgccacaacacacccgttccctgaaggagggagtggcgcctgtccccatcagacacggagcccttagatcccacctgccacccacgagcctcttcctctgggccaagaccaagagcccctccctgctctgcctttctaacagctcatgccccaaaggcagaatctgtggggcaggggcccccttcctgatatgcctggcgcaggttccccccttccccagctgtctcctcccggggcaggttccccccttccccggctctctcctccccgggcaggttccccccttccccagctctctcccggggcaggtttccccccttccccagctgtctcctcctggggcaggttcccccattccccagctctctcctggggcaggtttccccccttccccagctctctcctcccggggcaggttcccccacttcccccagctctctccacccggggcaggttccccccttccccagctctctcctcccggggcaggttcccccccttccccagctctctcctcccggggcgggttccccaccttcccccagctctctcctcctgggcccctgcttggctctttcttgagcagagaccagagggagcaaaggaagaactcgctgggaggccaggtctgtggtaggagggctcaggaagaggagtaggaccctccacagccacagcctcagaagaaaacctcagagtgaaagaatcacacccttcctcctctcctccctgagctgggaacccctgcaccctccccacccctcagctaggaggaagctaaaccttctgctcttcggggtggcctcgcaaaggtgccagcttgaaggagaagaaattcgttccctccatgctcgctttcccactcctgaccccattcccaccgctctgccccagcctgtttgctttcatctgaacacttcctgatatgcaaagggctgggtgtgtgtacctaaaaccatgtgcacacacggggcagacgagcctccacacagaagcctccgtcctggcctctggggtgcttgtgggggtcatcttctggggccctcctgcttcctggtgggctctgattacaggaaaagcctgggagcctgggccgaagtagggggtgaaggaaaaaagatgaagccaactgcattgaaattctggatctccttgacactgggaactgagcttgggaactgtgtcttgctacgctggggccacagggtgaggccactccccagagcccctcccaccgctggccacgactggccctcctggggtggactcctggccacgctgcatcgcaggctctttatctataaaacaggtgaatgaggccttcctccctgggctccagtgacgagtgactcgggtggcatggcagcaagcatgccaggccttctggggcaggaggtggaggaagtgggtacatttctttcccttatttcgaaaggccggtcgctgggggacagagctgacaaacggctatgtgaagtcccactggcaagtgagaaccggcccaggcccgtcttcctgagaagcagctggtatgggagccagggttgaagtcactcacgggtcctctccgagaactcgagtggtgaaatggagagccggggcctgcccttgtccctgcagcaggactggggaggagggggtgcctgagtggtgtgctagcgctttggcagaatggctgtgccgtgccgaagctcagtgtgggtcaccttgcctttcagtccaccctcctgcccctgagcccatacgcaggacttcaccagagacaaataacggcctcgagggtcctggccagccaagggcacacacccagccctgtcccctccccgcgagtgaaatcaggagtaacagccaaggtccccatcgtgtcatgagaaccatctgatgccccaagcgcaggccccgtccttgtgactggctgtgggtgagcgtccatttcttccccttttgcagacggggtgggaagttgaggaggaagcataaccattgtgttttgtcttcgtgtgggtggcagatgagcgcgtcgcggcttctgagaaatcccgtctccttggccttcctgggactgctgaccttcctgcttcccttatttccccctcagtggggactgcgccaaggcggggacaagaattcttgggtatggggattctgtggcgactctgcgggctcctccgtggggtcctgcgttgaggtgaaaaggataaactcttacgacgatgtcaatcctgaagctagttccatgtccctcatggagggtggggagtccccaaagctttcagctcacccacctgggcttggggggacactcttcccttgctcctgcctcccggtgccttctgtttccctgtctggcatgcctctctacgcccccactcctccacctgctcagctctccaaggacctggtatgtgtgcctcctccatgcagccctccaggctactccagcacaaccttggaaccatgtggttggtgcttacagtcagtcgcatcgtccatagtcatttcatctgtgttggcccattttgcccaactggattataaaggtctcagccaggcatggtggctcaacacctgtcatcccagcacttcaagaggccgaggcacgtggatcacttgaagtcaggagtttgagaccagcctgaccaatatggtgaaaccccatatctacaaaaactacaaaaactagctgggcggggtggtggacacctgtaattccagctactcaggaggctgaggcaggagaatcgcttgaacctgggaggcggaggttgcagtgagccgagattgcactattgcactccagcctgggtgacagagtgagactctgtctcaaaaaaaaaaaaaaaaaattgcagtctgggaccatgatcgtgtacgcactgacgggaatgccagtaggtagcgcatggctgtattatcccagtttcacacatgaggctgctggtgacacgaagcccagggatgctgagtgatgtgcgcacagcagagctgcgactcaagcccaccctgcctggcctgcaccaggtggaaccccatgcgcttgcctagcaaggaccagacaccgaggggccgttggttctaggacggcgagggtcagaaggagaggcctgaccggacgcagaggggccgttggttctaggacggtgagggtcagaaggaggggcctgaccggacaccgaggggccattgattctagcacagcgagggtcagaaggagagtcctgactggacactgaggggccgttgtttctagcgcggcgagggtcagaaggagggtcctgctttgtcctgcatggattgttggatctgggctttttagagctcggaggatgaaggagccagaaggcagagcaccatctgggtgtctgagtagatgagacgacttcttccagtgaacatgggttctgtctccatcagagtgaggcgatatatctgagtagatgagacttcatcagaatgaggtgatgtgaggctggagtgaggctgggctgggagtttgccgtggttggctggagctggtggtcgtcgttcagagggagctggcgctggctttggtgttcccttcagtgcagcattttcagcagtggagtcacccattctctgctagaatgcttctcttgtcggaaagctcactacttaatcctatgggggacagctctagtgagcccgaatctgaccccataacttttccccactgttcctgggtctgcagagcaacgtagattaagtctaagcctcgtttttgtttttggagacagagtctggctctgtcacccaggctggagtgcagtggcgcaatcttggctcactgcaacctctgcctcctgagttcaagagattctcctgcctcagcctcctgagtagctgggattacaggtgtgcaccaccacgcccagctaatttttgtagttttagtagagacggggtttcaccatgttggtcagacttgtctcgaactcctggcctcaggtgatctacctgcctcggcctcccaaagtgctaggatgacaggtgtgagccaccgtgaccagccaagtctaagcctctttccacgtggccttcaggtaggtgaagaacatcaacagaatccgacatggctggccgggcgcggtggctcacgcccgtaatcccagcactttgggaggccgaggtgggtggatcacgaggtcaggagatcaagaccatcctggctaacacagtgaaaccccgtctctactaaaaatacaaaaaaaattagccaggcgtggtggcgggcgcctgtagtccctgttacttgggaggctgaggcaggagaatggcgtgaacccgggaggcggagccgagatcgcaccactgcactccagcctgggcgacagagcgagactccgtctccaaaaaaaaaagaattcgacgtggctgctctccctctggccaccctgcccttccctgccacaccttccctgtatggcaggttatcaggccctgtgtcctgcagggcctttgcagtacagcctggtcatctttggtttttttttttctgattattcatattcattcattgtaggtgatttataaaatgcagagaaccacactgaggaaatgcctgcacgtcccgttatcccacggtcccactgctaggctggaaggtgatggcatcagctcccggccagtgctgggggttggtctgtgttatctgccacctcaccgtctacactggcaggccctggagcatcttggtatagacaggcaggcattgagaaagagtctgagactggagacccctgccatgcgcagtgggaaggaccatcacggtcgcttagcaatgtctgccacgggggtgggctgcagtgggggacacgtgaacgcccatgcctctccctgtgccaagtgacgggaacttggaacatcagtgaggccaagactggtcttgagtaacttcgggtccctaccttctgagtcctagaaccacattctgtttcttggaaggaaacagctataggcttgagttccctgtcaaccctcccttccactgaagtgtgacaaggagcttatgactcggggcacaggctatcgtggaagaaagacgcggatcctgttaacccagtacaggctgctgctgagctcagctgcgtggtaggggagtgagcccaggcaccacccctcgggcctggcacagctgccaggccaggttcctgctgtcgagtgtgcggcttgttggggcctgtggcagtggctccttgatacaaagctcgtttcagtgccctgcctttggcagccttgtctgggcaggacttgggcagcgggaagggctaacgatcggccccggggcctgccgacactctggtttgtttacccccgacctctgctctttcttcctctgtttctcccagcccatgaaacccctgaaggccaccgccaccacctcccagcccgtgctcaccatccagcagatcgagaccatcttctacaagatccaggacatctatgagatccacaaggagttctatgacaacctgtgccccaaggtgcaacagtgggacagccaggtcaccatgggccacctcttccagaagctggtgagtctgccagggatggagggtcctcacgcagggcctcagtggagcccatagtgttgcaggagcctcaggagaggaccgggcagccctctcggactccttgaaggcctgagacctctccgagtccgggaggaaggcctgggcctgtgtgttatggggtgcctggggccggggccttgactctaggcctcccctggtgcagccctgggagcttctggggtggtggagacaggctgtgtggataggtccttccaggggtggtggagatgggctgtgtggatgggcacttctgtgggagcaccatctctctcccggagggtgctccttctccctcccggagggtgctccgtctttcccggacggtgctccctctctctcccggagggtgctctgaggaaccagccctggaatgaaggcttcttgctgggcttcagtctcctgtccctcagtgaacagaggggcacatgccgggttaggggcatgaggactgctcccctgagacctcgggtctgtaaaaggaagcagttgggcacactggccgatgatcctctcctgaggtcccaagagcaggaagcactgaagcccagccctgctcaccactgcagggtcgggagcggcaggagtgggtgggttaacatgcagacctcgtgttgggaaacgttcacagaagtcttctggttccctgtgcttctgtgacaccctctcccccagctctgccccatctctggctgtgtcccctggaggacccccaggtcagactcatggagctccctccccacctctgctacgtaacgtctgaccgcccagcaggcaagagggagactgggagtccaggccgcggttcttctctgggtgtgagtggccagaggaccttctcctccttcctgccctgttctctgggtgtgagaggctggaggcctcctcccctcccctgccgtgttctggctgaatggacagggctctgcctttctcacgctggagaagactctccctctcctgcctggacactcctaggacctctagctgagtgtgttcagagctgagctccctgcctccggcgtcacctgctccgcttcctgtctttacctcaccgagtgcttcagactctttctggctgcaccccctcccccacctgtcctgtggactccactttttggccgttgctcacagccgccttttcctcttcttggccacccatggccctcacctggacagctgcgtatcctcctgtgtggctcctgcctccaggcccactcacctcccacccccacctctccttagaggggagagagtcactgaaacctcgacggccccttcagcggatccccacggccctcggatgaaggtcaggctccgaggaatggctcgagagaccctttgcacactgacccgtgtccagccccagccttggcagcttcctccccgcacctctgtgctcctgacactggactttctgttctcagttcccagggcaggcactttcttaactcttggtacttgaggccccgtgtgcctgaaacgtccttccccctctcgtctggcctcccctggtcagttcccagcttagaagggacctcctccaagaaggctttccaagtcgccaaatgcaggccttgtgccagtcctcgtagtgagcactagtaactgcctgactcccccaaaccacaagttccaggaggacggactgcatttcctttttttgttgagacggagtctcactcctgtcgcccaggctggagtgcagtggcgtgatctcggctcactgcaacctcctcctcgcgggttcaagtgattctcctgcctcagcatcccgagtagctgggattacaggcgcccaccatcacacccggctaatttttgtatttttagtagagacggggtttcgccatgtcggccaggctggtctcgaactcctgacctcaggtgatccgcccgcctcggcctcccgaagtgctgggattacaggcgtgagccaccgcgcccggcctgcatttccttcttcttagactcccagaaccagcccagtggtcactgcttgaatgagtgaatgcaccgtgaccttgaccactgggcctcgggagaactcggaagggcatggagggagacgttgcagggcctgagatttctgtcctgagagtcctgtttctccagcacagcttctagagccgtgtcacaaagtgggcttgaatcccagcgctgccagattaaacctgcaactgggcaacttacccaaccgctctgaatcagcttcctcatctgtaaaaaacaggatagtaacagtatttacctcattgggtgattttgaggagttaatatctgaaaactgcatggggctgagtgtggtggctgacgcctgtaatcccagcactttgggaggctgaggctggaagatcacttgaggcttagagttcaagaccagcctgggcaacatagcaagaccctatctctacaaagaaatagaataggcctgactgagcgtggtggctcacgcctgtaatcccagcactttgggaggccggggtgggtggatcgtgaggtcaggagttcgagaccagcctggcctacatggtggaaccccatctctactaaaaatacaaaaaaattagcagggtgtggtggaatgcacctgtagtcccagctactcagggggctgaggcgggagaatcgcttgaacctgggaggcagaggttgcagtgagccaaaaccacaccattgcactccagcctggatgacagactgagactctgtctcaaaaaaaaaaaaaaaaaaaaatggctgggcacagtggctcacgcttataatcccagcaacactttgggaggccaaggtgggcggatcacctgaggtcaggagttcaagaccagcttggccaacatggtgaaaccccgtttctactaaaaatacaaaaattagccgggcatgataacacgcacctgtgatcccagctactactcgggaggctgaggtgggagaatcgcttgaactcgggaggcagaggttgtagtgagccgagatcgtgccactccactccagcctgggcgacaagagcaagactctgtctcaaaaaaagaaatagaatacaataaagtaaaagaaaaagtgcttggaacagggcctggaacatcataaattaataagtactcaataactggtcattatcatcagtgccattattattattattattattattattattattattattattaaattgggaagaggcaccctggaaggtatccttccaagggaatgccacactctggttctagcatacccccccctgctccctccggttcagggatggtgaacacctgtcatcactgcctgctcacctgagctgagtggcctggggggcatcctctcctcatccctcaggagggtagaggagagcaaacctagggttgctggaaacgctgtcacagtttatctttgtcacttggacctggctgtccccggttctggtcttggctccacaggcctggccgtgaatctgctacccaccactttccctccccagcatcgtgaaccgatgcctgaggcccctggggctgcagatttgggagggcccggggggagccgggtcaggtctggcatccggaggtggtttattttcagccgaagactctgggtatttgattattcgttactgagagaagggaattagcgtctctgctgtttgttttatgagatcactccagtgccaggctgctgtttccaggcaacctgcacttcccagttaatgaacctgccaagccaggcctcgggccctaccgcctggggtgactgtggcagcggcagtccctgagattaccgtgaccctggacgcaggcctccgcacggctggctcctgcccctggctcctgggagggtggtgtgccaacccgggcctccaggctttctccttcttgtgggaaagggggcaagaggagccttttcctggaagaatatcggtgatctgactttggcttaggcagcgactgtctagtatgcctcgtgtagcgtgggcattgatgggccgggcctcagtactccctggaaaaggaaataaactccctcccgtccggccccgcccccttttaaggtcaggccccaccccctttaaaactcaggccccgccctcttttaaaagtccggccctgcccccttttaaagtcctgcccttctgcagctgagacctgaatgcctctggccttggcgtcacgccgggcgtccccactcgcgctcccctctggcttttccagatgccccccgctcccctgccccaccagcttcctcaaagggctctgcctctgtactgggaggctccaggctcagccgatgctgcggccagcctgcccccacccctacccccaccccagcctctctgggtccttggggagcatgaggatcctgcagaaagcagagtggtccggggtgggggtccacagcagcccacttcccccagcaccttggtgggaagcagaggcccctgaggaagccaggcagcagctgtatcccccttgctgctgtattgaaaaacatttaaaccagaaactccaaagaataacagcagaaccttctaatgaagaaaatacagcgtcacacatgaaggtggagtctcccctccctcctccctcttgaagcagctactggcatgaatttggtggatagccttccagactgcagtttgtgtgtttactacatatctgtatctattttgggttggcctgtactttaaaaaaaaaaaaaggtcttgctatgttgtccaggctggacttgaactcgggctcaagtgatcctcccacctcagtctcccaagtagcgagggctataggtgtgtgtaccacagctcccagctgcatgtactttaaaaatgtgtctaagccaggcgtggtggctcacgcccgtaatcccagcactttgggaggcggaggcgggtggatcacctgaggtcaggagttcaagaccagcctgaccaatatgacgaaaccctgtctctactaaaaatacaaaaactagccgggtgtggtggtgcgtgcctgtagtcccagttagtcaggaggctgaggcaggagaatcacttgaacccaggaggcggagtttgcagtgagccaagatcgtgccagtgcactccggcctggttgacagagcgagactccatctcaaaaaaaaaaaaaaaagtgtataagtatacacatatatcatattttacagttcaacccatgttcgttttggagcttgtcagcaatcgtattttacagttcaacccatgttcgttttggagcttgtcagcaatgctatgtgtaaatcgggtgcatccatgttcatggctgtgtgcgcggcttcccccgtttgtgagcatttgttaccagtccctccactatgaggaggaaaagtgagatggtgaacacccttgagtcccctggggcacacacataggccatttgctccagagcactgctgtctaatggaaatagcttatgagccacgtacatcatttcacattttctaatacccaccttttttttgtttttttgagacggggtcttgctcttgtcacccaggctggagtgcagtgatgcaatctgggctcactgcaacctccacctcctgggttcaagcgattctcctgccttgtcctcccaagtagctgggactacagatgcgtgccaccacgcccggataattttgtatctttagtggagacagggtttcaccattttggccaggctggtctcgaactgccaaccttaggtgatctgcccgcctcggcctcccaaagtgctgggattacagttgtgagccaccgcgcctggcccctaatacccacatttttaaaagtaaaaataggcaggtgaaattaattttgagaatatcttttatttattcccgcagatccaaatattatttgaacatgtaatcagtatttaaaaattaacgaggtaatttacattctcttttacatactaaggctttggaacccactgtgtattttacatgtccggcacgtctcagtttgaaccggccgtatctcaggtgcttggtagcctcaggtagctggtggcgactgcactgaacgatacggctctgcagtttgtatgtaaaagtggatttgctaagcaatcgatgggctgtgcctatccacactgttattagttcaactgaaaataggccatgcctattctcagctttattagttattaacaaattgctctccaaataattgtactaatttacacttccccgagtagtctaagagtttaaattggccgggcgcggtggctcacgcctgtaatcccagcactttgggaggccgaggcgggtggatcacgaggtcaggagatcgacaccatcctggctaacatggtgaaaccccgtctctactaaaaaaaaatacaaaaaattagcctggcgtggtggcgggcgcctgtagtcccaaccactcaggaggctgaggcaggagaatggcgcgaacctgggaggtggagcttgtagtgagccgagatggcatcactgcattccagcctgggtgacagagcgagactccatctcaaaaaaaaaaaaaaaaaaaagttttaattggccgggcgcagtggctcacacctgtaatcccagcactttgggaggccgaggcaggtggatcacctgaggttgggagtttgagaccagcctgaccaatatggagaaacgccgtctctactaaaaatacaagattagccaggcgtggtggcgggcgcctgtaacgccagctactcgggaggctgaggcaggagaatcccttgaatccgggaggttgcggtgagccgagatcgcaccactgtactgcagcctgggcaacaagagcgaaactccatctcaaaacaaaaacaaaaacagggagtttaaatttccccatatgcttgccagccgttgctgtcaattagacttttaaattttgacccttctgatgagtataaaatatctcgtgatggctttaatttgaatttctaccctttggtcccttaagaggaagtgcttatatacagcgcagcgaagcctttccataaatatttggggaattgacttatggagcctcggtttccccttttgcagaaaggggcgatggggtctgccctgcctctcagaagaggcgaggctctgtgtggttgtgactcaggttgtgactgtgtgagtgacaggcaaacgtgtagtgaggctggggctttggctccttggaggtagaggaggtggaagaggtgaggacggggcctcaaggccaagggaaatggaaagacagcatcttcatttgttgttttgttttctttttgagacggagtcttactctgtcacccaggctggagtgcagtgacacgatcttggttcactgcagcctccacctcttgggttcaagcgattctcctgcctcattctcctgagtacctgggattacaggcacgcgccaccatgcccagctaatttttgtatttttagtagagacggggtttcgccatgttggccaggctggtctggaactcctgacctcaggcctcccaaagtgctggggttacaggcgtgagccgccacgcccggccaagacagcacctttaaatgtcgttccccacgctgcacgtggggagggaggcctgagcaggccacacgtgccagctccccccagcacacacacccccctctctccctgctccggctaattccaggatgtgaaggaagtatgagacattaagggatttcaaaccctgggagaccttcaccgtgctgaggaaagctggatgctgtgaagagttgaatttctagcaggccaacaaaggccctagcctggtctccccaaccccagaccccctcattaaccttattggctgagctggtttccatggaaactgtccagttcaaagggacactgtaatatgttcatccctgcgtttccccaagttcccaacgagctgagtgagaggttttcagtgcaggggagctcccggtgctccgtgaagctttcatccattcattaatcctctcccctcccaccctcctctccctctgttccctgactcctccctgcaggccagccagctcggtgtgtacaaagcgtttgtcgataactataaagtcgctctggagacagctgagaagtgcagccagtccaacaaccagttccagaagatctcagaggtaggccgctccccacatagccaccctgagggacaaggagctttgggggctgctcagagcccttggtctcccctccctcgcttgccagtcggtgaagtggttactctaatgggtaacacttagcctgatatttgctttcttgcacctgacattttccctcttaatagaaaacgatctattttatttatttttttattattctctttcagattagagagaggaacaggggaggcaaaaaaaaaaaaaaaaaaaaaaaatccaaggcagtgttctcccacaccacactatggtgaccttgagcaagtcacgtcccccctcttggcttttatgtcctgtccggtagaatgaggggtttagaaatggccagataatccttttttttttttttttttttttgagacagagtcttgctctgtcgcccaggctggagtgcagtggcgcggtctcggctcactgcaacctctaccccctgggttcaagtgattctcctgcctcagcctcccaagtagctgggattacaggcgcacaccaccacgcctggctaaggtttgtatttttagtagagatgaggttttgccgtgttggccaggctggtctcgaactcgggtgatgtgcccgtctcagcctcccaaagtgctgacattacaggtgcgagccactgagtccagcttggccagctaatcctgaccttgcttgataagaatcactggggcattgtttaaaacacagatttcctggcaccttccccggagcttctgattcagaaggctttgcgtggggcccaagattctatatttgaacaagcttctgggtaatatttatgacagggaagtcttgaggaaatttggactataggtcgtcttttaaggttcttgccaactctaagactgccatcccataaacacaaaaagggtaagagccacttatgtggagaaggagccttagaatccctggccgggaacacgcgtgcttctgctcctgaggcccagccttcctggccaggaacacgcgtgcttctgctcctgaggcccagcctacctggccgggagcacacgtgcttctgctcctgaggcccagccttcctggctgggaacacgcgtgcttctgctcctgaggcccagccttcctcccgcactcctccacagggcagaggtgcagtcctatctgccatcaacatttctacctaagaggtggcatggagggacagttgcttaggatccttcaggacagagcccagttcatccctttgtccaaaaagacctcagtggcacccctgaagcactggcctgagaggaacagcccccagctcagggcaagagaacctccatcctagaaaaggggagaagcttctgcagttttgggagtcctgccgtaaaggcccctcttggccctttgtgttcccgtctcagctctaacgctagaagagttggggaaacgcagggtagttttcctgaaacttcaggggtgacggtcgatgcccacgtttagaatccaccgagaggcagcagagaagctgacagttggagatgaacatgtcaccttcattactgttaaaaaaatgcagcttggaaaatgtggatttggatctgtagccacagtgggcttgctgacacttcgcctctggaatgaaacgtacctatagaagccgggcgtggcggctcacacctgtcatcccagcactttgggaggccgaggcgggcggatcacctgaggtcaggagtttgagaccagcctggccaacgtggcgaaacgccgtctctactaaagatacaaaaattagccgggcgtggtggtgcacacttgtaatcccagctatttgggaggctgagacaggagaatctcttgaacccgggaggtggaggttgcagtgagctgcgatcacgccactgcactccagtctggtgacagagcgagaccctgtctggaaaaaaaaaagtatctattgagtcccttgcaggaataggaaaacacaggcccctctccacaatgaggacagagcccacgcctcttacccagtgtgcagagagaggatggctgaccatagtttcttctcccagacccatggagcagatgtgtcaccctctgcctgggaggacgaagtgcagggtggggaagtccctctccatggagtcaagtggctggagaggccaggtgcagtggctcacgcctgtaatcccagcactttgggaggccgaggcgggagattggcttgagcccaggagttcaagaccggcctgggaaacatggtgaaaccccgtctctattaaaaatacaaataaaaggggctggagaaatggtgctttccctgcggtttccagcccaacccaggaactacctggactcccctggtctgtgttcagatcagccctgccaaggccgcccaagatcccggggtcagacatggtgcagagagtgtggggtcttctcttggcctgggctgattgcctgttctctgtgcctaggcagaaacccccacacccaaccataagcccctcacagcctgcccaccctggagggcagagccaggcccctggctttctgccaggtggcttctcatcctgactcactcgatgacgtgcttgcttcctgctgaggctgccacttaattactgcaattaggctcctctctgcagcaggagtgatttcataccctagacttcactggagggggcgtgaggaaacattcccgaaatctgggagtccaggcaccagccagagacacaggctggggacgctgagtatcccccacccccccgccccccaaaatatacacacacccaagctccatctccaggagttttctctgtctagaaacagcttgagacagaagtaggaagttcctgctgtctgagcgcttcctcccctgcagaccaagcaggtggcatcacctcggcagctgaccttggcctcatcacctgggcagctgaccttggcctcatcacctgggcacctgaccctggcctcatcacctgggcacctgaccgtggcctcaccttgcctcctgccttccctcccacacccctctttgaggctccgtgtgctccgtctgccaagtggggatggtattacagctccagttgcaggctgcactgtcctgttagcaaaagctggggctggaacgtctctaaaggaggataaagaggcttggagcagatgagtcatcccgggggtctttccagtactcactacctgctgcctggcttgggatccaggaggggcattggctgttcctccctcgaagcttcctctcggacccccagcatgggcagtggtgggtggggagtgtcgggggtgctgggggctgagtaagtgctctctgatgggggtaggatgcagctcactgtcctggggagctcagcatctctgccgaaggtccaccacttccctgctggcgtgtgggacccttccttcctacctcatgggttcctcatgccctaaagattggctggagtacctggcgctggtcaactcaaaccctgtctgcccttggccgacgtgtagggttcctgagtcggggttcctgtaatcacagggctccctgccagcctctctcatctctgggacctggagtcccttccttcttgcccacgccccagccactggactccacgaggctccaggagttcacaggtgtggtgcaggggattggggtggcagaggcagcccatggccatggggctcctttgtctttctttttttttttttttttttttttttttttttttttttttgagacagagtctcgccctgttgcccaggctggagtgcaatggtgtgatcttggctcactgcaacctccgcctcccaggttcaagcgattctcctgccccagcctcccaagtagctgggattacaggcacctgacaccacacctggctaacttttgtatttttagtagagatggggtttcaccgtgttgaccaggctggtctcgaacttccgacctcaggtgatccgcccaccacggcctctcaaagtgctgggatgactggcgtgagccgccacacccggcctctgttctcatatgtacaccctgagtttcagaactccccttcttgccaggctcacagtgggggctgggagaggtgagggacagaacaggccatgactcctctcctccctttggcaggaactcaaagtgaaaggtcccaaggactccaaggacagccacacgtctgtcaccatggaaggtacctcggggagcgggctggattacaggcacctacctttgtctggctgtgcaggcaacaggctgcgtgaacgcggcgcccttccccttgtgtgtgcgtgtgtgtgagcgcgtgtgagcgtgagcgtgtgtgagcgcgtgtgagtgtgagctgagtgcgcgtgtgcgcgcacgcgaggactctagcctcgtgcccaggcagccagccagctacaaacgtgctcctctttaggatgccagcaggctgctggctccctccctccctacccctcctccccttccccttccctcctctcctcgccacgcgcctccctcccctcccccttgctggaagagcactccggagcggctgcccgatgctggagtccgtgcggcagcatcagcaaggtggctgagtggccgggctgctggtgggcgccggggagcctggagcgatggctgcacgctcccgccgcggggacagaggctgccatggagattctcctcattattcgcttctgctgtaactgcacctatggtaacccaggtgctcgctgtgggaggtggcggaccctcccacctctgggggccggctggagtgggcttagatgtggccggggaggttagagggccgcagggaaggagggtgggcgagcggctggacctgaattcccccttcgttttggcggcatccagcctagagttgaaacctgggggctgctcagagcagggccgcttgcaaatggaaggaccaggctggaggggtccaggtggccccgaggatcggtggggaattggtgggctagtgtgagagaacttcctggaggggctgttagggagagacggcgacgagctgtgcccgcagacgtagtagccctgaggccagggagagggtctgcgggggccaggcacagcgtggcgatgggtggcgatggtccggacggcggcgttgccagccgagagggtgccagcgcgagccagagggagaagttgggagtttctttgtttctggagagaggcgcggaggctgggcggcacggtattgtgtgctccgcgcacatgcagcagtaggcggaggacacggaggggctgtgggagcaggaaggagaggtttgtttccagccgtgagagacccccagccgaggtctgggccctcaactgtggaaggcaggtcggcagggccagcgggagaggggtgtggcaagctactctgtgaaggtcacacacacacacacacacacacacaccacctttcggtggaagggacccggaccatcctccttgcagctcccgcagctggctgggggctggggggaagtcccgggacaggtgcatgtcatcaacacgactgtcggtcgtaggaggatgaagccggcccaggtagggaggtgtccagaagcccgtggaccctgcctcaagaggcaagacgtgccaaggggtgccctgcctgcctgtggcagggagtggggtgggcacgtgtggctcccaggccggctgctctgggcctgagtctgtgggagcagcaggcggctggttttaggaccttcctcttccttcccaccaggtgtttcggctctgcacccttctcagtcactttgctttcctatctccctggtaacctggagctccttggagctccttgtcgaaggctgacttgagggggatggtggcttgccggaagagagatggcaggtttcctgggctccttcccaggggcggctgtgctggaggggctgtgtggggccagtgccccctgaccttctcaggaccctcttgatggaagcaagctctgaggcagcctctctcctgcggcccagcagggcggctgcaggaaccctgttctcacttgaaattggcctggtcagcgatcagaggagaaatggtctttttggtctggcctaggagttggtcaggtcttgactctgcctccctgaaaaggaaacgtacccttggcttcctctcccttccccaaaaggaagcttcgactcagtgaaacggacctgggacctggagttcacgttgcttcggtctccgtgatactgttgttgaagtcggcttcaaagtggggaatgaggagtgaaagggccagctcgtgaggagggggctcaccccatcctggtcactctttccaagaacgctcctgtggttcattgaggttttacaggtgctgcctttccctgaagaaggtgcagctcaaagcaaggagtgcgggtggatctacccagctcccaccacttgtagccacaagtctctggcctcagttgccttgtctgtaaaatggggctagtgagaattgcttcccgttttaatcacaggaaataatgagagcaaagcagttaactcagtacccttgggcacagagcgagtacccagcaaactagagagagaccagcttgctgcccaagtcagtgtcagtggagagggagagtgggtgaggccgggcaggaagcaggccagcctgcaggagcccagggacaggggaagggccagagcgagtgcctcaccctgagttctcaggggaccccagcgtgcaggggccgtggggagcacaaacttcagggccgctcttattcccccggttccctccgtatctgatgtggtcccagtgccgccaccccccccacccccaccccccccgtgcacctgccctcctggccgcccttccagggctcattccacagccttactcaggtggactctggaggtgaccacagacatgttaataacccctctgaaacccaacctgccatgtgttcagacctctgagcttagtcagaaacctcttcctcttgggacccaagagagggctgcggggagccgataatgcagtgtcagctttctgtggagccgccactccggagcccaccctggcaggtgtctgctgagcttgtgctttcttttgggtctctggggttctccagtgtgattttttccccctgaagatgggctgagccacaggtgggtgccttaaacagcctcagaaatggatcccacctgagctaggacctgggctgcaccctcagtgccgaggataccccaagactggcctcattccttcaagcttccatggcccatggggagggtctctggaaactgctagataagaaagggctacagatatgtcatatgaagtgtatttacgtaaaccagtggttggccgggtactcatgcctgtaatcccaacttttggcagactgaggcaggaggattgcttgaggccaggagttcgagaccagcttgtatttggcttgaggccaggagttcgagaccagcaacatagtgagaccttgtctctatatttatttttatttaaacgaagactcactgtgtcgcccaggctggagtgcaatggcgcaatctcagctcactgcaacctctgcctcctggattcaagagattcccctgcctcagcctcccaagtagttgggattataggcgcctgccaccacacctggctaatttttgtatttttagtagagatggggtttcaccatgttggccaggctgttcttgaactcctgacctcaaatgatccacccgcttcggcctcccaaagtgctgggattacaggcgtgagccaccctgcccggcccctcgtctctatatttttaaaaaaattaaaataaatacataaataaaacataaagcagtggttttcaaccattattatacattcaaatcagtaaagaagctttatagaaatgctgatggcccttgtggtcttgcagagatttgggttgagttgacggggctggggagcagcatctgtatcttttaaccgctcccccagtgattccgacaggcagccaagctcggactgcgggtaaggctggtggccctgctgaggctgcattttcttcacagccagcagattgctccctgaagtgtctgcttagccgcgcacggggtatttatatctcaggctttggagaactatcaggtttggggcccggctagggcgtgcgtgttcacgctgggacctgtcacaacctggtcttatgggacacccagtctgggatccttcttcccagatgaccaacctgcctctgtcactgcccctgcggcaggaggcccaaggtcatgaccccagggacagagcatccaggtgcaggactgaagctgagcctcctgttgggagggtgggcgcagccgcgtacaggaagggtgttgggaagtgttgatccaccagctgccacctccacctgtccctgctgaatcccagccatcctcacttggtgtccgggttgtggagggtgtggctcttgggggcctgggctggccttgcctgcgtcctcccagcctctttggggctctcatatgtgaggcctaacctgagttgcttcaggaaacctttgcccctcaggctgccacgtgtttgagagcacagccttttttctttttttttgagatggagttttgctcttgttacccaggctggagtgcagtggcatgatcttggctcgctacaacttccgcctcccgggttcaagtgatttccctgcctcagcctcccaaatagctgggattacaggcatgtgccaccacgcctggctaatttttgtatttttaatagagatggggtttcactggttggccaggctggcctcggggagcagagcctttctgtggagatcaggccagcctcctggcctccagcctccctgcctccagccttcctgtgctttgctatctggggtttgaggatgtggggaggggtctttcctctgagagatgaggccagtcctgtggatcacagtgaggcatgccaatcccagctggctgtgcctggccttcagctccaggagcctgagaatgataaggtctggagagctgcccttcctggaaacacagcatgtctccttcccccattctggggtcctgcatgtggcaggtgtgctagactctgcagggcatggctgggtggagctgtgtgattctggggttctgcgtgtggcaggtatgctggactctgcggggcgtggctgggtggagctgtgtgattctggggtcctgcatgtggcaggtgtgctagactctgcagggcatggctgggtggagctgtgtgattctggggttctgcgtgtggcaggtgtgctggactctacggggcgtggctgggtggagctgtgtgattctggggtcctgcgtgtggcaggtgtgctagactctgcggggcgtggctgggtggagctgtgtgattctggggtcctgcgtgtggcaggtgtgctggactcttcggggcgtggctgggtggagctgtgtgattctggggtcctgcgtgtggcaggtgtgctggactcttcggggcgtggctgggtggagctgtgtgattcagggctgggggtccaggagagcatctgccttgagccaggtgaggccaggacaggcctggggaggggggcggggcggctctcgatgaagccatgtctgatgggagaggaggcagggctgcggagggagcaggggctgccagggctgtgtgtcacctgtgtctgctgtttggtcggcccggggagtgagaacagaggtgggggctgccgtgggctcactctggtgtccctcgaggggtgttcacgtgggaagcatgcgggtggggggacgaagctggtctctggggtgttgggttgccctcgtccatcatcctcttcctccttctccctgtctcccccgacagctctgctctacaagcccattgaccgggtcactcggagcaccctagtcctacacgtgagtgtcaagcctccgaatggccagagagggcttaggagttcagtggaagactgagcctgggtgagagggtgctggagtcaccgagaacagtccacctggggaatcaggggttcctaggctccaaggatgcctgtctggcccgcggtatccatgccgccaggctagggcctgaatacagcttggctactaagcttgacgtggccaggtgctcccggggaggcaggcattcctgcttccccacccgctgcctcctggtctccagtgtccttggagcagctgcagggcagacacagggtttctctcccagctgctcggggggatgagcctccacctggtctccacactggggagagagtatgactgtggccaggagaagagggggcagccagggccctctcccctgctgtgctggctctgattttttttttttttttttttttttgaggcggagtctcactctgtcacccaggctggagtgcagtggtgcgatctcggctcactgcaacctctgcctcctgggttcaagcaattctcctgcctcagcctcccgagtagctgggactacaggcgcccgccaccacgcccagctaatttttatatttttactagagatggggtttcaccacgttgcccaggctggtctcgaacttctgacctcaagagatcccccgcctcggcctcccaaagtgctgggatttcaggcatgagccgccgtgcccggcctgactctgatttgtagttcagattttgcgggaattaggcaggtccctgagtgcccaccctttggatggggactgagcactccccggtggccacacatcaggccccagagccgctcccctcaactcaccgcctcacccttcccaggacctgctgaagcacacacctgtggaccaccccgactacccgctgctgcaggatgccctccgcatctcccagaacttcctgtccagcatcaacgaggacatcgacccccgccggactgcagtgacaacgcccaagggggaggtgagctcagagcccggcacggcccctcacccaggctgagaagtatcaggtccctcgtccccttctctcacacacgggcggcaggtccctcgtccccttctctcacacacgggcggcaggtccctcgtccccttctctcacacacgggcggcaggtccctcgtccccttctctcacacacgggcggcaggtccctcgtccccttctctcacacacgggcggcaggtccctcgtccccttctctcacacacgggcggcaccgggtgcctcctgcctctccaatcctgatcccccattcccagccaaggagaggttttcagcccttggtcaccctgatgacctgcagctttccaggccctaggctgagaagtttaagtccagtgtctcattaatcctcataataatctagggaggccgggcacggtggctcacacctgtaatcccagcactttgggaggctgaggcaggtggatcacttgagttagaagtttgagaccagcctggccaacatggtgaagccccgtctttactaaaaatacaaaaattagctgggcgtggtggcggatgcctgtagtgccagctactcaggaggctgaggcaggagaattgcttgaacccaggaggcggaggttacagtgagccgagatcgcaccactgcactccagcctgggtgacagagtgagactccatctcagaaataataataacaatccagtgagccagaagaacctgaggctggggagtctctccaggtccaccacgcagtctttcagccactggtgtcagagctggattcctcacctgggactgtctggaggcccacgccggggaagtggcctccgggtgcctcattcttgaatgcagacacctgcctctggccagtgtgatgccgtcagggtctcctaggaagcgaagggagcaggagcttggagctgcttcagctcggcctgcacacgcagtggcttgcggggagcccacagcaggaaaggctggcgttggaggtggtggaggccgtccaggttgccggaatgtccagtgggcacctgcatgtgggacagccgttccctgggggcccttcttgatgcaagggtggggacagcccagcaaggggagtaccaggaagcatgagagggacagttgccttcgtggattggcagccgggcccgggtgaaaggcttcctgtccaggggaggccattaggcggccgttacgagtgaggctgacagggtgtctgctcctgtggtctgtttacgagcccccagggtctcctggggagaaagtggtgagggacaggcctggacagtgtccactgggcagagagagccgattccgtgcggctcctggtgctgatgtgcagcgtctggggatcccgtcgtctgttttactctggggatatctgaaaaatctccagagggcttagcgtaccctccgttttcagtcatcctttttttgagactgaatctcattccatcgtccaggctggagtgcaatggcgtgacctcagctccactgcagcctccaccctctgggttcaagcaattctcctgcctcatcctcccaagtagctgagattacaggcaggcgtcaccatgtctggctagtttttgtatttttagtagagacggggtttcgccacgttggccaggctggtctcaaactcctgacctcaggtgatccacccgcctcagcctcccaaattgctgggatgacaggtgtgaaccactgcgcccggcctcggtcatcttaattgtatactttgaatacgctcacctacgtattacagcagatgtaggtcacaccgtgtatcatacaggaaaggctggcacagatggggacgaccccccggctctgagcgggggttggaaactctggaactcccacgtggagcagaaaccacccagagcccaggttagagttggctgcaggtcccctctgggcactgctgcagtcccaggctggagggcccaggtctcatccccagggggctggagaagccagggaggagtagcacagacaggcctgagtgggtctcgggtctcgggtctcggttgagccggggctagatgaagttcgccgccgcggtcgggagggattgcaaacggggatgttcgtgccccagggtggagaaaccaggtcgtcccgggcagggggctccagggttagccgcggagagccccgtgcgttgcacacacttaatgtgccaggcactgtgctgtttcacatgcaccatctcgatgagtcaccttatgaggcagacctcactgtccgcacttaacagaaggtgaatctgggattcagagaggtcagggagcctgtctgagatcacagctgagaagcctgttggcattcaaacccatgcccatgtgactccaaaggcagtgcttgaaccacctttggttaagggatgacaggctatgccgcctctcggtccagtcctccctggctggccgtgcccccgtgtgcaggctctgccctcggccgcattcccctctgagcaggctggggggtctgccatctccctcagacgcgacagctggtgaaggacggcttcctggtggaagtgtcagagagctcccggaagctgcggcacgtcttcctctttacagatgtcctactgtgtgccaagctgaagaagacctctgcagggtgagtgtgtgagtccaggggcacggggcgggggagggggtccggacctctgcggggtgagtgtgcgagtccggggcgggggagggggtcctgacctctgcggggtgagtgtgcgagtccaggggcgggggagggggtccggacctctgcgaggtgagtgtgtgagtccaggggcgggggagggggtcctgacctctgcggggtgagtgtgtgagtccagtggcacagggcgggggagggaggccggaccctgccacccatggagccttcagcaactttgttggttttttttcttttgagacagggtcttgctctgttgcccaggctggagtgcagtggtgcgatctcggctcactgcaacctctgcctcccgggttcaagcgattttcctgcctcagcctcctgagtagctgggattacaggtgcacgccaccatgccaccatgtctggctaatttttgtatttttagtagagacggggttttgccatgttggccaggctgatctcaaactcccaacctcaggtgatctgcccgcctcggcctcccaaagtgctgggattacaggcatgagccaccgcgcctggccggttttttccttttaaaaactatattaattaacttaatttcactacatagccttttttcctgaaagtaagtcatgtttttaattataaagataatataaggccattggaggaaaccccgtcccccactgaagcatgaggtccgactcctgccgcgctgcttccttccctgtttttaaatgttctcatgtttcttcacacagtcgtaatcactgtgaatgcccaatttggggctctgctgtttctgtttcgtgtcataagcattttccctgttgctgcctcatcttcataatcatccttttactttcctgcacgatgttacccgtagatgtgccatcgtctacttaagcattctccttttattagacatctctgaatttctgctaactgcagtgctgtgaatattcaccacgtctcctgctactatttattgagggtttatgccatgccaggtgccgtgacacatgctttgaatacatgatttctagtcctcccaacacctccacaaagtagcgactgttgttccctaatcatagatgagagaggagtcttggagaaggtaaataagcagcccaagctcgcacagctagaggcacaggtgggactggaaccccaagctgacgtgcaaactcctttgagcctccttctctctacccgggagggtgggactggaaccccaagctgatgtgcaagctcctttgagcctccttctctctacccgggagtgtgggtctgctctgtgccttgagcagaggctcattctgcgttcattcacacattcttccacccacacttagtgatcaactgcagtgtgccaagcacaccccttctcacggctgagaagcggcagtctggattcaaacccgtgtctgtgggactcgtttaccatcaggctatcttgcctctcccttcagccctccctggttggctgtgcccccaagtacagcacaggggactccacagccagtgtgttacaccaccaggctatcctacctctcccttcagccctccctggctggctgtgcccccaagtatagctcagggggagcaagccccacgcccacctcaacactcaagggtcagaatgagaagtgcaaatctaagtcctaggggaaggatcgatgattatgaacgtcaataaagggatgactgggcgggcacggtggcttatgcctgtaatcccagcactttgggaggccaaggcgggtggatcacctgaggtcaggagtttgagaccagcctggccaacatggcaaaactccgtctctactgaaagtacaaaaattagctgggtgtgatggcaggcacctataatcccagctacttgggagaatgaggtgggagaatcgcttgaaccctggaggcagaggttggagtgagtggagatcgcgccattgcactccagcctgggaacaagagcaaaactccatctcacaaaataaaaataatttaaaaaataataataataaaggacatgactccctggaactagatcatgtttgagatagttctgaggcagagatggcaataataagcacacatgcttctgcctgtcgtcctttgcgatggcagacattactaatcacatatgcctctgcctgctgtcctttgccatggcagacatcactaatcaactagggcacactttcttgctagacttggatgtggctttgtaatcctccacccagtgttgacccatgtgaccactcttgataagaggtggcatttggaataacacctgtattccattgctagcctgaaggatattgaacacggatagtctagaagggagggaggggattgtggtggggaataggaaaatgtgagcccagccaggaaggcttcgctcttcttgatacctaagtggtttgggatgtttgacaacatgagtcatctgggccagaagcctggtaaggtgaaggggcggagttgctccctgcgggcggggcggaccccagaacccagctttcatcactccagtgtgtgtttcccaatcaggctcctcaggagcagggatcgttcttgcttctggcgagttctcagtcaacccctgtcagtggttctgtggttctggacccaagagttgaggctggaagagccaggctccctctggctcatggctccctctggctcgtttgcaggaagcaccagcagtatgactgtaagtggtacatccccctggccgacctggtgtttccatcccccgaggagtctgaggccagcccccaggtgcaccccttcccagaccatgagctggaggacatgaagatgaagatctctgccctcaagagtgaaatccagaaggaggtgagcagagcttggtatctgagcctggggccctttgagccagctgtgttgggggaggtggaggcaggaagttgtaaggtttgagactttgagagggagccttgagtgtgtagttactaagggaaagaccccgactacagtagctccaagcagatcgagggggtcagtgctcaggatttcatagggctaacatgggaagtgccctggaaagcagtgcatgttgaacacgatagaaaggggaagcaagtagccaggcgcagtggctcacacctgtaatcccagcactttggaaggccgaggcaggtggatcacctgaggccaggagttcgagaccagcctggccaacatggcaaaaccctgtctctactaaaagtacaaaaattagcagagtgtggtggtgggcacctgtaatcccagctactcgggaggctgaggcagtagaatggcttgaacccgggaggtggaggttgcagtgagccaagaacatgccaatgcactccagtctaggcaatagagtgagattctgtcaaaaacaaaaaaaaaaagtggaggtagagggaagcaagagaagaaaaagcaggcttttgtaaggaaaagcaggacctgtgcaaggaaaaggacctgggaggcctctcagaaactgacagatcaagtaggcaaataaataaggagagagaggacctgaatgccacaattaacatgcttgacttaaaaatgcagagaagcttgtgccctgacagaaaactgagattcttgtcacacacgtttgggaccttcacatttatcctataataggccactaaggaaatctcaaaatttttctgcaagttgatagcatacaagtcatgttcacagaccacagtggagtaaaattagaagtgaacaagaatattggtcagcctgggtgcagtggctcacacctttaatcccagaactttgggaggctgaggatggtggatcgcctgaggtcaggaattcaagatcagcctggccaacatggtaaaaatccatctctactaaaaatacaaaattatccaggcgtggtggatcatgcctgtaatcccagcactttaggaggcccaggcaggcaggtcacctgaggtcaggagtttgagaccagcctggccaacatggtgaaaccccatttctactgaaaatacaaaattagcctggcgtggtggcttccgcctgtaatcccagctactcaggaggctgagacaggagaattgcttgaacctgggaggcagaggttgcattgagctgagattccgctgctgcactccagcctgagcaacagagtgagactgtctcaaaaaaaaaaaaaaaaaaaaaaagcattggtttggaaagttcaaactgacaaggtaaagaggaaatcaaaattcaaaatgagaactgcaaactgtttagtgctgtctggaaatgagtgtactacataccagtacccatggatgcagccaaagtgctgtttagaggaacatgaatagccctcagttcacataacaacagtgtctagaggaacatgcatagccctcagttcacataacaacagcgtctagaggaacatgcatagccctcagttcacataacaacagcgtctagaggaacatgcatagccctcagttcacataacaacagcgtctagaggaacatgcatagccctcagttcacgtaacagcagcgtctagaggaacatgcatagccctcagttcacgtaacagcagcatctagaggaacatgcatagccctcagttcacgtaacaacagtgtctagaggaacatgcatagccctcagttcacgtaacagcagtgtctagaggaacatgcatagccctcagttcacgtaacagcagtgtctagaggaacatgcatagccctcagttcacataacaacagcgtctagaggaacatgcatagccctcagttcacgtaacagcagcgtctagaggaacatgcatagccctcagttcacgtaacagcagcgtctagaggaacatgcatagccctcagttcacgtaacaacagtgtctagaggaacatgcatagccctcagttcacgtaacagcagtgtctagaggaacatgcatagccctcagttcacgtaacagcagtgtctagaggaacatgcatagccctcagttcacataacagcagtgtctagaggaacatgcatagccctcagttcacataacaacagtgtctagaggaacatgcatagccctcagttcatgtaacaacagtgtctagaggaacatgcatagccctcagttcacataacaacagtgtctagaggaacatgcatagccctcagttcacataacaacagtgtctagaggaacatgcatagccctcagttcacgtaacagcagtgtctagaggaacatgtatagccctcagttcacgtaacaacagtgtctagaggaacatgcatagccctcagttcacataacaacagtgtctagaggaacatacatagccctcagttcacataacagcagtgtctagaggaacatgcatagccctcagttcacataacaacagtgtctagaggaacatgcatagccctcagttcacataacaacagtgtctagaggaacatgcatagccctcagttcacgtaacagcagtgctagaggaacatgcatagccctcagttcacataacaacagtgtctagaggaacatgcatagccctcagttcacataacagcagtgtctagaggaacatgcatagccctcagttcacataacaacagcgtctggaggaacatgcatagccctcagttcacataacaacagtgtctggaggaacatgcatagccctcagtttacataacagcagcgtctagaggaacatgcatagccctcagttcacgtaacaacagtgtctagaggaacatgcatagccctcagttcacataacagtgtctagaggaacatgcatagccctcagttcacataacaacagtgtctagaggaacatgtatagccctcagttcacgtaacaacagtgtctagaggaacatgcatagccctcagttcacataacaacagtgtctagaggaacatgcataaccctcagttcacataacagtgtctagaggaacatgcatagccctcagttcacataacaacagtgtctagaggaacatgcatagccctcagttcacataacaacagtgtctggaggaacatgcatagccctcagttcacgtaacagcagtgctagaggaacatgcatagccctcagttcacgtaacaacagtgtctagaggaacatgcatagccctcagttcacataacagcagtgtctagaggaacatgcatagccctcagttcacataacaacagtgtctggaggaacatgcatagccctcagttcacataacaacagtgtctagaggaacatgcatagccctcagttcacataacagcagcgtctagaggaacatgcatagccctcagttcacgtaacaacagtgtctagagcaacatgcatagccctcagttcacataacagtgtctagaggaacatgcatagccctcagttcacataacaacagtgtctagaggaacatgcatagccctcagttcacataacaacagcgtctagaggaacatgcatagccctcagttcacgtaacaacagtgtctagaggaacatgcatagccctcagttcacgtaacagcagtgtctagaggaacatgtatagccctcagttcacgtaacaacagtgtctagaggaacatgcatagccctcagttcacgtaacagcagtgtctagaggaacatgcatagccctcagttcacgtaacagcagtgtctagaggaacatgtatagccctcagttcacgtaacaacagtgtctagaggaacatgcatagccctcagttcacgtaacagcagtgctagaggaacatgcatagccctcagttcacataacaacagtgtctagaggaacatgcatagccctcagttcacataacagcagtgtctagaggaacatgcatagccctcagttcacataacaacagcgtctagaggaacatgcatagccctcagttcacataacaacagtgtctagaggaacatgcatagccctcagttcacataacagcagcatctagaggaacatgcatagccctcagttcacgtaacaacagcatctagaggaacatgcatagccctcagttcacataacagtgtctagaggaacatgcatagccctcagttcacataacaacagtgtctagaggaacatgcatagccctcagttcacataacaacagcgtctagaggaacatgcatagccctcagttcacgtaacaacagtgtctagaggaacatgcatagccctcagttcacataatagcagtgtctagaggaacatgtatagccctcagttcacataacaacagtgtctagaggaacatgcatagccctcagttcacataacaacagtgtctagaggaacatgcataaccctcagttcacataacagtgtctagaggaacatgcatagccctcagttcacataacaacagtgtctagaggaacatgcatatccctcagttcacataacaacagtgtctggaggaacatgcatagccctcagttcacgtaacagcagtgctagaggaacatgcatagccctcagttcacgtaacaacagtgtctagaggaacatgcatagccctcagttcacataacagcagcgtctagaggaacatgcatagccctcagttcacataacaacagtgtctggaggaacatgcatagccctcagttcacataacaacagtgtctagaggaacatgcatagccctcagttcacataacagcagcgtctagaggaacatgcatagccctcagttcacgtaacaacagtgtctagaggaaggcaccacgggaggagcatccctgtgagtggaggaagggcctggagcggtttggtcagcttggtctgttttcctcacctctcaggttcagcttaggcctcaccacccctgggaagcttctctgacacccacgcccaccacagtcttggttgggtgccctgtccccagatcctgtggctttttgttcacctgtggctttgcttaaatggtactgaattgtaattgcattgtcagactcctctcttccccactggaatttgaactccagggacagcgctattttcttctgttccatgttcctcatattcgacacgtagaaaacaggtggttagggcccagcatggtggtttacaccggtaatcccagtactttgggaggctgagacgggtgggtcacttgaggccaggagttcaagaccagcctggccaacatcatgaagccccgtctctatgaaaaatacaaaagttagccgggtgtggtggtgggtgcctgtaatcccagccacatgggaggctgaggcaaaagaattgtgtgaacccgggaggtggaggttgcagtgagccgagatcacgccactgcactccagcctgggcaacagagtgagtgggactccatctcaaaaaaaaaaaggcacttagtaaacaaacaattattgaagaaaacataaccagatggcctctctgaggatcctttcaactcaagcatctccctttgaacaggggaaagcaagatcaccattacagccccaggagtgttcagggctgggggatgtcctaggacagagggtccaactggtggtacatctgcccagagggcttcctcgccagcacagctgtccccctcctgaacggctgggccctgcccacagtgcccgcccaggagcatcctgcgtgcctgtttcccacccgcccctgggaggcttgctgcctccccgttgccccagctgtgcagacgtggccttgtgcccagtcgagtcaacagtcaacactcagtgagccccactggctgtgctgcctggggtgtgccgggtgcctcatgtatatccctgtccagtggaggaagcagacacgccccttgctgaccacagagtgtggtacatgtgagtcactggagaggcacaggtgccgtcctctgagtcacagaagaagcagtgatttgttttttgttttttgtttttttttgagatggagtctcactttgtcactgtcgcccaggctggagtgcagtggcacaatctcggctcactgcaacctccacctcccgggttcaagcaattcttctacctcagcctcctgagtagctgggaataaaggcgtccgccaccacgcctggctaattttttgtatttttagtagagacggggtttcaccgtgttagccaggctggtctcaaactcctgacctcatgatccacccgccccggcctcccaaagtgctgggatgacaggtgtgagccaccgtgctcagccttgttctcttgataataattttttaaattttcatgttttttctaatccccaatataatactggctggttttaatgagaaatgctcgtagtaccagcatgtacagggtaaagctggtcgccactcacctcccactgctgacagtttgaggtgtattcttctgaactcttctttgcttatgctggtgtgcgcccgcgtgtccaatgagactagactacacgtgctgttttgcaacttcagcattttactccacagtgggtctttgagccctttggatgtatcagattctttttctttctttttgaggtagagtctcgctctgtcacccaggctggagtgcactggtgagatttgggctcactggaacttccacctcccgggttcaagcgattctcgtgcctcagcctcccgagtagctgggattacaggcgcccgccaccacgcccggtagtttttgcatttttagtagagacggagtttcaccacgttggccagggtggtctcgaactcctgacctcaaacgatccgcccacctcggcctcccaaagtgctgggattacaggcgtgagccaccgcgcctggcagtatcagattctttttaacaactgcctcctgctctgtcgcttggctgcatacaaatgtttttgggtgtttggattgtctctgattcttcgctcttagcaggcaagtcaacagtaaacatcactgcgcaggtgcctctgcagtaggttccctccaggtgggatgggcagggcagggtgagtgtgcgcttaattgacaggcttttacctctgaaaaagctgtgactggtggcattccccctgcggtgtgtgagggtgactgtcccccacagtgtcacaacactggctgtgaacattctttacaattttgccagtccagtgggttaaaaagaacaaaacaccatagaggtgaattctaactgaggagcttgaggatggccttgggagctgagacttgaagcataatggtggttaataaaagggagggggtcctttacgaaacagacagaaacttggaacattgagggagcaggctctgcccgcagaggatgaatgtctggtgagagggggaggctgagccgacgggacctggtgggttgtctgccgggcagggaggctggaaccctgccatgggggccttggtgccaggctagcaggtggggcttcaggctgaaaggtgtctgaggtttctttaagcaggtgtctctgttgtacccaggatttaatgtgtagaggcagcagagtgacagtacagagaggttaatactactgtaatatttgtattatttagggttctcaagagaaggaggcatagcaccccgcccagggccacgtggagaggtgccagctttgaacaggaggcaggaatggaaagaaagtgtggccacagcttttctgtggagaaacagggcagggaaagggcttggcaccagctggcttccgttatgtcggcagccctgggctagaggagtggtctctggtgacctggtccctggccctgggtgacgtggggcagaggagatgctggcttggcgagtgagcgtcaggtagagaaggtggttggggacatgggctctggatcagtgggtgtgtgtatgaaagctgtgctcatagggcatcactgacaggcttaggaattagtgagccctgtgggggagcagtttctcacccagctacccgcctctcctgccacaagatgtcaaaacatcacgaaatacggaaaatgtaaagagcatgttaacacacagtggagtgtcgtgcttagtgctgctcgtgagaaaggcccgagtgtgaggggaaccctctgtgtccccatctcctgcagaaagccaacaaaggccagagccgggccatcgagcgcctgaagaagaagatgtttgagaatgagttcctgctgctgctcaactcccccacaatcccgttcaggatccacaatcggaatggaaaggtcaggatgggtgggggtgggaccaagacagccccttccttagtccagagcagcccactctgtggctcctggccctgacctgtacgaaccggaaactcaggccccctcttcctgaggaggctgccatggctccagctgttgactcgctctcccctctcgtgtggaatgagtgccctctgctggccgtccctggcacagccgctcctgtcaccttggcttcccaggaaggagctcccccttcacccacccacccccagctgcctcctcctgcaaggtcagctgtgcctggataaggaggagctttgggccgggcacagtggctcatgcctgtcatcccagcactttgggaggctgaggcaggcgaatcacctgaggtcaagagtttgagaccagcctggccaacatggcaaaactctgtctctactaaaaacacaaaaattagccgggcgtggtggtgggcacctgtaatcccagctactcaggaggctgaggcaggagattggcgtgaacccgggaggtggaggttgcagtgagccgagattttgccattgcactagagcctgggcaacaagagcgagactctgtctcaaaaaaaaaaaaaaaaaaaagataaaaggagctttgttggggtccccaggatctgggagtacgctttgcctgactgtggtcacccactttatgcttatctcctctcttcagagttacctgttcctactgtcctcggactacgagaggtcagagtggagagaagcaattcagaaactacagaagaagggtaaattcctgcctcttccacgctccccaatgatgtccgtggcattgatgggccttttgtatttctaagcgtttcatgtccagtatcacgtctttggccctcgcagtcaccctcagaggtgccagggtgagcgtttaaggatgttacggattaattgagacccaaagaatctaactgattggctgaaagacatgatgatttagtcctgggactggacccagagcccagcctgggctttctctctctctctacctctctctctctctcacacacacacacacagagacacacacacacacacacacacacacatacacacatacacagaggctgggtacggtggcttacgcctgtaatcccagtcaggagtttgagatcagcctgggcaacgtggtgaaaccccgtctctactaaaaacacaaaaattagccaggtgtggtggtgggcacctgtaatcccagctactcaggaggctgaagcaggagaatcccttgaacctgagaggcggaggttgcagtgagctgagatcacagcactgcactccagcctgggcgacagagtgagactccgtttaaaaaaaaaacgaaaacaaaacgcatacaccacacacacacacacacacacacacacacacacacacacacacacacacacacacacaaacctcttcagttagattctcctactctgacccctctcgcagcatctacaccagtcctgctgtgtccacaaatccttccccctccctcgcaaggaccaagtctgccccagggattaagccgtcttcctgcagcagcccccagggaagagcagccggtcctggtggaccagtgcccacgctcccttctctctcggctctccctccagatctccaggcctttgtcctgagctcagtggagctccaggtgctcacaggatcctgtttcaagcttaggactgtacacaacattcctgtcaccagcaataaagacggtaagctcgggaaccagaggtggcccaaccggcaggtcccagccctcagagcgtggccggcttcccgtaaggactcagacagacatgtggctgtaaatggctgatccctgctcggctgtgctgagactgttgagtggccaggacacagcttgggtaggggtgactgtctactgagttcccagatgaccccagcttttccttgggcccctctgtctggcttgggagaactggcaccctggtgcactgagattgtgctgttaatatattcatgagagagcagacccggtagataaaatggtgtatgggaaatgaggctggaagtttccagggaccagctcttgaaaggccttgaatcccaagcaagggagtttggaattcatgctgtaagcccgggagtctgggggggttttgagcagtggggagctgtgatcagggctgggaactgaccggagtgggtgtattctagctgcctgtgtgctgggaaagggtccactttgtgaacggggtcctgaaggcaagctttcctcgacataaatcattagcagaatgatttatcatattggtcagttttcagtgccaggataggcaggatttggagggagagacagtacccatggggaatggtactaagtccctgggccaggatggtgggtgtgctggacccccccaggctgagtggaggagagaaggaccccctagccctaccccgggcagctcacatataaggccgccgtggccttcggaaactttttcatctggccaccaggtggtgatgttggaccaagactcagctgagtctcataccccgtctgcctcccgccggcctggggtggaggctgaggggatccgctgaccaccctctgccctgggggcttttctctcttgcagacgatgagtctccaggactctatggcttccttcatgtcatcgtccactctgccaagggatttaagcaatcagccagtaagtgccctggccaggacgaggttgggtgggccattgtggattctgcactgctctgcccaggatggggccctgccagcacgcctttagacatggggcattcccctggaggccagaaaccagctcctcttggcagggaggtcacccctggcctttgtctccaaagtcctctttctcaagccctccctgaagctgtctgaaacctaggggccgggcgcggtggctcacccctgtaatcccagcactttgggaggcccaggcgggcggatcacgaggtcaggagttcgagaccatccgggccaacatggtgaaaccccgtctctactaaaaatactaaaattagcgtgggcatggcggtggacgcctgtagtcccagctacttgggaggctgaggccagagaatcccttgaacccgggaggcggaggttgctgtgagctgagatcatggcattgcactccaccctgggcgacagagcgagaatccgtctcaaaaaaaaaaaaaagaaaccgagtgcgacaaacacgtggactccaacttcatatctgagggcgacaaacacgtggactccaacttcatatctgcccatgacaagctgtgtgaccttgggcaagtttcttaacctctctgggcctccactaaaaggcagtcacgcttgtgaattttgacccgagagcaggctgggatatgatcgtgtgtgtgcaacgctggtgtgctgccacgctcatcgctttttctccccttcccccttgtgggttcctcatactaaatctgtttttagtgtctcacaaagtaggattgcactttttaatttttaaaaaatttttttttagagacaggttctccccatgttggccaggctggtcttgaactcctgggctcaagccatcctcccacctcagcctcccaaagtgctgagattacaggcgtgagctgctgcgcccggcctggttgcgctttttatctacctgttatccacacgggaatctgtgagtcagttagacagctaatagtttctacccatttgccagaggaggtaaccgagtcacagagaggagaaaagacttaacatcacagaggatcagaaaccctgactctctccctctccacctgcccctcccactccctgctcttcactggcaggtggggtctgccctcacccctccctgcagcgccccacacagaggtgactccccgggccgttagagcagcctttcccaggaagcctccctgagttcctgggggcaaactggcctcccttctttgtcccttctttgtgcccacatcccctcaggttccttgtgcccccatcccctcaggttccttgtgcccccatcccctgaggttccttgtgcccccatcccctcaggttccttgtgcccccatcccctgaggttccttgtgcccacatcccctgaggttccttgtgcccccatcccctcaggttccttgtgcccccatcccctcaggttctttgtgcccccgtcccctcaggttctttgtgcccccatcccctgaggttccttgtatccccatccctttgaggttccttgtgcccccatcccctgaggttccttgtgcccccatcctgctcagggcaagctggttatggcacctgtcatgctgttttgtcacttaacaatttgcgtctcccactgtgagttctctgagggcgggaaccaggtctcctttaccctgggatgcatgggagctcagaaatgtggaatgaagtcgttaatttacacagcacctaccgtgcacctggagaaggtgagaacatggctggcgtgtggacgtactcacatgtgcaaagcctgtggcgtgttcagagcctctcagtctcacggtccgctctgagcctccggcatcccgccgaggtcacggaaaccatccctgttttacacacgaggacgccgaggctcggaggggctcaaggttccttcctggagtcacacagtagcaggtggtgcagcagaatccacgtcttccggcaccagagccggagctctaaccttttgggcacttctcgatgtctggccgggaacaccacacggtccctcaggctgcttgttaccgtggaagcttcctgaactctctccagacccacagacctcccttcttgggggctgccgctgaggagcttctggctagtgagctctgaagcactgtcccacccatgtctggaccaggcgccaccactccatgtccccagatgccgcccctccctctcctgcttcccgttggccgggaggtcctcgcctcagggagccgacccgtggcctcccagcctgggcgggtgtcagagccggctgagctgctccaaaatctctctttacccccagattatcctcactcccttcgccgccgccacccctgacccactcatatgtctgttctcactcagaggtgaggccctgtgtcttcagccgtggtaaactcaggacctctggacaggcaggcccagggtgtaggcaccatgacttttcctgctgtgcagacaggaacctggggagagaagggaggtgatctgtgcagagctggggtgtggacccagatggtctgactccggaaccctcgctctgaccctgtgagccgtccccagctccttccggaaccctccctctgaccctgtgaaccctcccccagcccgttccggaaccctccctctgaccctgtgagccctcccccagccccttctcgaaccctccctctgaccctgtgaaccctcccccagccccttccggaaccctccctctgaccctgtgaaccctcccccagccccttccggaaccctccctctgaccctgtgagccctcccccagccccttccggaaccctccctctgaccctgtgacccctcccccagccccttccggaaccctccctctgaccctgtgacccctcccccagccccttccggaaccctccctctgaccctgtgacccctcccccagccccttccggaaccctccctctgaccctgtgaaccctcccccagccccttccggaaccctccctctgaccctgtgagccctcccccagccccttccggaaccctcgctctgaccctgtgacccctcccccagccccttccggaaccctccctctgaccctgtgagccctcccccagccccttcctgaaccctccctctgaccctgtgacccctcccccagccccttccggaaccctccctctgaccctgtgaaccctcccccagccccttccggaaccctccctctgaccctgtgaaccctcccccagccccttccggaaccctccctctgaccctgtgagccgtcccccagccccttccggaaccctccctctgaccctgtgaaccctcccccagccccttccggaaccctccctctgaccctgtgacccctcccccagccccttccggaaccctccctctgaccctgtgacccctcccccagccccttccggaaccctccctctgaccctgtgacccctcccccagccccttccggcaccctccctctgaccctgtgaaccctcccccagccccttccggaaccctccctctgaccctgtgagccctcccccagccccttccggaaccctccctctgaccctgtgaaccctcccccagccccttccggaaccctccctctgaccctgtgagccctcccccagccccttccggaaccctccctctgaccctgtgagccctccccagcccctcgaggaggggctcacaccgagatcaatccatgatgacagcacttcatggcccgtctcaaacacacaggcccactccctggtctggcccaggctggggtgctcagggcctctgtgttgttcacctgcaaatccccagccccgttctgtgtgttctgaggcccacctgggtcttctttctgttgctccagctggaggcttcttggggtagctgcactgtcctttctgcaggaaagctggtttttttggtttttttttttttgagaaagagtcacttggtcgcccaggctggagtgcagtggtgccatctcagctcactgcaacttccacaccccaggttcaagcgattgtcctgcctcagcctcccgagtagctgggactacaggcatgtgccaccacgccgggctcacttttgtatttttagtagagatggggtttcaccatgttggtcaggctggtctcaaactcctgacctcaggtgatctgcccaccttggcctcccaaagtgctgggatttacaggcgtgagccaccttgcccggccaggaaagctgttctgatggagaatggcccagctgggcagctgcaggggctaagtggagtaagccacctgcactgtatgcccgcactgtgacctctgacgttgtttcacgctgcagagggttggccatagtgtcccaaaggcacctcccacaccacctctggtaccctgggaacaacctcggcatctccctggaggtgggaggactgctggggtccgagcccagggcgggtgtgggtttgcagagggcctggggtccgtgccggtgctgtggcctcagcagttgggtcccaaggtagattttcagcctgaaggccagggtggaagatggaaatgccggggaaagcccccggccctgccctcccgccccagccctccactgccttgttacctggagcgcttggtggtggtgggagcctcgttcaccgtgtgccagctgggttcccagccctgttcttggtactgcgggtacaccggcaggcaggaaaacccaggcttctctccacatggtgtttacgtcgtggggggagagagactagggacgcacgagtagagaagatccctttggtttatgttaagtgcagcggaggaaaccacagcaccctgggcttggggatgtgggcgttgttggtcgtcaccgcggcaggggatgctccgagcattcaggacccagaggcagggctgctaaacgcctcccaccccaaatgccgctgttgaggcctgggcacccatgttacggggagaggtggctccagggcggtcagtgaagagtttgtggtgtcgtctccatggtgaggaagatgtggagacggaacagtcaagggccctttagagggaggaggaggccagagtgtggggagggccgaggtgggaagggcagagtgtggggagggccgaggtgggaagggcagagtgtggggagggctgaggtaggaagggcagagtgtggggtgagccgaggtggggagggctgagcccctaagaagggggcaggggagaagccagatggtcccgggcttcagggaggagagagccaagatgccatccgtggggacgttggaaaggacagatgcgatgtccccctccatcctgagtgccgccccagctgccccaccctggccccactcactcagtatctccgtctgtccttcccccacagacctgtactgtaccctggaggtggattccttcggctattttgtcagcaaagccaaaaccagggtgttccgggacacagcggagcccaagtgggatgaggtgagtggcaggggctggcatctctgtggggaccccaccaccccgtgctcgtggcttgtctgctggggacggccagcccattggttggaccagctatgtctgcacccccctttctgctccctgctcctctggcttctgatcgcggtgtgtgtctgggtgtcagaccctgtggtgtcagctcaggcccccagactccaggggtgatgggaggcctctgggagctccagaaaatctgacgtgtccttcgtgggccgtgcttactccctcctccttgcaaagctgaggcacgcacctgccggaaagccaggcctcccagcttcggaggttcagggccctttgtcccatctttccccaggagtttgagatcgagctggagggctcccagtccctgaggatcctgtgctatgagaagtgctatgacaagaccaaggtcaacaaggacaacaatgagatcgtggacaagatcatgggcaaaggacagatccaggtgaggccagggcgccggggcgaggctgagggagcctccaggaggtggttccagttgaaaaggaattctggtcaaggagcctgctctttcgtgattttggttccaagctggttggaggaaagttcccaggaggtggttctcccctccctgctagaggtggctgcctgttgtggccccggaagcccaggcgtgtgcgtggctcctcaggtgggtcatctgcgcttctgcaagatggaaacaaccagctttgttttcacacgccagctttagtctatgggtggttgtttcccggaacgccatgttgagaaggactcagaggctgcgtcggtgaacgggagggaggaatgctgtgtgtgaggagccgtgtctgccattgacgggggaccggagttaggcacacggaccaggcgtttgctcttctgcccgaaagacttagggtcctgctggttggcttggggggaggggggtctctgacttgttgttagggtggccggaccttactcagctgcgttgggagtctgtggcttcgggtggggactctgggtgttagtagaggctgcacctcgggttaagggtatttatgcttctgggtgcggtggctcacgcctgtaatcccagcaccttgggaggccgaggtgggtggatcacgaggtcaggagttcgagaccagcctggccaacatggcgaaaccccatctctactaaaaatacaaaaattagcaggtcgtggtggcgggcgcctgtaatcccagctactcagtaggctgaggcaggagaatcgcttgaacccaggaggtagaggttgcagtgagctgagatcgcgcctgggtgatggagtcagaccgtgtctccaaaaaaataaaaataaataaaaacagcatttatgcctcaactgtgcttttggctccctataaacatatatagggaaaaggcctctgtgtgtgcagcctgtgtctctgaaacattctgccaattttgaagatggctgctattcaccaacctattaagagaagtaggcttgggagcgggaaaaggcgtgacgtggtggagccgctcacactcccgtctggtacctcgtgtggcctcgtgctgtgccgcaagtggtctggtttgggggtagattctgtgaccatgaaatgaagggagacggtaactgacccgtactgaggttgagcctcgggcgttgggcgtgctgagcttcttgacagtggccgcagacgtgatccaggcacagctgggcgccgagcttcttgaccgtggccccggacgtgatccaggcgcagctgggcgccgagcttcttgaccgtggccccggacgtgatccaggcgcagctgggcgccgagcttcttgaccgtggccccggaggtgatccaggcggcagctgggcgccgagcttcttgaccgtggccccggacgtgatccaggcgcagctgggcgccgagcttcttgaccgtggccccggacgtgatccaggcgcagctgggcgccgagcttcttgaccgtggcccaagaggtgatccaggcgcaggctgcgatggctccgtctacaacagggagctgaacgatgctttttagcaggaagcatttgttctctgatgcattgtcatggccaccgagtttggtatctggctcttacctgcaggtccttggtagcattgcccctggggagctgtgtgggtctcccactcgctgccccatctcaggctccagtgtttgaaccaggggccccacgtggaggggcctggcctctgccgcatacgccccgtgttcctaaacacgtctctttccgatgctgtggggtctgcaccctgcttctcagtactcgtcactagggagacagggctgccaggcaactgccagccagtccttcgtgatttaggaaatgggctctagagattcagtccctgggacctgctctctgtggggataaggggagggagccccatctccctgtccctgggctgggctagagggacaggcacggaagggttctgggctggcctgtgcagccccaggagacgcccaggcaagagacgagtggtcgccacgccacactccctgggccactggtggctgtggaatagaagagttacaaggatgtgccgggcagccagccccgtgggcacggtgggccccagcccctcgagaactcagctcccaaggcccgagggcacattcccccacctggacttcagccccattgcttccctccttctcactcagctgcacaagccccgggggaaacacaccatcagtcactgcaagcctcttggagacaggagcagatggaggcagtgggggagggaggaagccaggttatgtttggcaaagcagaaggcagagtctggtaaggaaaatgtttctgtgtttaagcttcgaggaatgttaaatgcctgggagttgatattaaaagaaacataaaccttcctgctgccagctgacctgggcctgtgagcggacagttcagagccagagtcccctgcaggcctttgaagtcccccagcactcagcatgccaaggcccggccctggccctccgctgcagaaccatctcaccagcctgcctttggtgggggaggcatgccccaggggcgggctgtggcttagaaagtctcgccccgtgactgccctcagagccaccgtggatggccaggctgggtgacgagtccacacggagctgttcccacgaacccgggccccacggagccacggaacggtctgtccccacagcttgtctctgccttcactccggccacacatctaaggaagggagctggcactagcctctggaatgcagtctttctgcccgccagcaggcgctgaggacatagtcggaggtggctttgagatagggcccagccctcggggatattcagggggcctgtaggaaaggcaggaggaggagggcagtctctgaggcccccacttctctctaagccccctcccagcagcccatccagagaaagcaaggggccctacggcctaagcgcaggcatttgctgctgtgatgaggcccccactctgggtcgcctgatggggcagtggggcaggagtctcagcggcggggtggggtgggggaagcatttagtgacagacagacggcagcatgcgtcaccaatgtgtgtccagcacttgtgctcctggaggccgcttcccaaatgccatctcctcgtgtgatccttgtcgtgatcctccagggagaatgacagtccctcctccccatcttacagatgaggacactggggtactgaggttaagtaccttggccaaggcatctctgcgtatggtatgtgggaaaggccatgttccctcctctgtgccatgtccccacgtctcaggcctttgtcaacgaatcccccagcccggacagagggccgtggcatggctaatggcctggagaagcagctgaggtgctgctttatggcataaggtgagcgtcctttgtcttggagtcctctgggcaggggacacttgtgcctggtgcccctgggaggaaggagaggagcacgtgcgggaaagagcaggaggccgaggtgggctgatcacgaggtcaggagttcgagaccagcctggccaacatggcaaaacccctttcctactaaaaatacaaaaattagccaggcgtggtggcacgcgcccataatcccagcactttgggaggccgaggcgggcggattacaaggtcgggagttcaagacccgcctggccaacatggcgaaaccctgtttctactaaaaatacaagaattagctgggtgtggggcccacgcctgtaatcccagcactttgggaggccgaggcgggcggattaggaggtcgggagtttgagactcgcctggccaacatggcgaaaccccgtctctactagaaatataaaaattagccaggggtggtcgtgcgtgcctgtaatcccagcacttcgggaggccagggcggggggatcacctgaggtcaggagttcgaaaccagcctggtcaacgtggtgaaaccctgtgtctactaaaaaaacaaaaattagccaggcgtgatggcgggcacctgtaatcccagctacttgggaggctgagggaggagaatcacttgaacctgggaggtggaggttgtagtgagctgagattgctccattgcactccagcctggacaagacagaatgagattctgtctggggaaaaaaaagaaaagaaaacagcaggaggggtacttagcatgcgtctgtgaggtccccagcccaggagggggtcctggcctccagggacccactgtcagattggaaagacgagtatattggtccatgttctccagtgagaagaatgctagatgtcagccacaatagccgtacacacataagcgagcccaggacgagcccagcacggtgctaaatgcttccatctgctgtctcaggagatcttcccaggaccctgtgggagaggaatatcatcacagctagaaagatgaggaagctggggctaaggagcccggacaaggccatgtgcccaggagtgggccagggcgggcagctggctgcagagcccatttctagatgtcctgctgcctcctgctataagaagacggaagattgtcctgctgtaagaagacggaagattgtcctgctgtaagaagacggaagattgtcctgctgtaagaagacggaagattgtcctgctgtaagaagacggaagattgtcctgctgtaagaagatggaagattgtcctgctataagaagatggaagattgtcccgcaggaattcagaggcagaaaggtcaccatgggctggaattagggaggcttcaaggaggaggtggaacgagagcgatttggaagccctgggttttttaattccaaaagcaatgtttgtatgagaaagaaaattgcagtagaagcaaagagacttgaaacctaatcagaaaccatccttcctccggctcctccgaagcagccagtttattctgtgccttttcccttcttgaggtatacacatttttatgtagatttaatcagggcctgttttgtctgtttttctgttttcatggattattataaacctccttttctctagagctgtatggagtcttcttaagcacctttttggatactttgttaaaagtactttatattctttgtagaaatcttggtatagagcggccagcgcaattgctatgctaaggctctgtgttattccagcaaggtgcgcaggctccgcttccgcagaagggagtagggtgggagttctggaggacagacccgcctggcagggaggcacgaatgtgaagggagggtcccaggaaagtcaggagcctcagcaggggtggcggggagctgcaagcaaggccagtagaaggaatgaataaaaggaggggattcctgggggtttggccggaagaggtattttttttttttttgagatggggtcttgctgtgctgcccaggctggagtgcaatggcgcaatcttggctcactgcaacctctgcctcccaggttcacgccattctcctgtcccagcctcccgagtagctgggattacaggcgcccaccaccatgcccagctgatttttattagtagtagtagagacagggtttcaccatgttgaccaggctggtctcaaactcctgagctcaggtgatctgtccacctcagcctcccaaagtgctgggattacaggcctgagccacggcacccggcctggaataaatcttagagggcgtttaatccaatcctgttttccggagagaaggaaatggacaccagcaagggtgagcgaggcagccgcggtcacagagcttgttagtgggtgaacaagggccccagactcagggaccccatccaggtccgcttagctgggagccccccctccaccggctcttgcccctgcccccggcgtagtctgccctggctcctggtcccaggggactccactgtgtttatcctactctatttccagccttgccgctccagctgcaacctacccgctagctgattagcatattcccagggtccggcccttcttggcgggctgggcctgaggagagcgctttcccttggggccccacagctcagtttctgccagcgtccccagactggagaagggcctgagaccaagaagctacttaaacctgaggggccctctgcaccccctgcccgccccccggccctgcgtcattccctcgctcaccgcaggctggggacagcccccaccccacagtccacctctgctccctgtgcctgggaggcagctccacttccccacgtgcctgccagggcagcccctccctgggcacagcagcgctgaagaccctgtggtgggaggggcaggttccaggccaggaagggagtgtgagccaccgcgtccggcctttattctttttaaagaaaaaatagtggtagaagccaggcatagtagctcacgtggtgtagctgtggactacttgggaggctaaggaggctagagtgagctaaggattgcgctactgtactccagcctgggtgacagagcaagagtctatctccactgaaaaaaataaaaaataaaagattgtagtgaaatatacataacataaagttaccattttaataaattttaggggccgggcgcggtggctcacgcctgtaatcccagcactttgggaggccgaggtagatggatcacctgaggtcaggagttcaagaccagcctggccaacatggtgagaccccatctctacaaagattaaaaaaaattagccgggcgtggtggtgcacgcctgtagtcccagctattcgggacactgaggctggagaattgcttgaacctgggaggcagaggttgcagtgagccaagatcatgccactgcactccagcctgggcaatagagtgagactccatctcaaaaaataataatttttgggtgcacagctccgtggccataggtggatttggtgctgtgcagccgttgccagtgtgcatatccagaacttgttggccctccccagccgaaaccccatccccattaaatcataactccccactcctgcacccttagcctccagtaaccacctgcctgctttctgtctgtacgaatttgtccagtctgggaaccttacgtaggtggaatcagacagcatttgtcctcctcatgtccttgagcttcacccatatgccgttgtgtgtctgaatttcctccctttctgaggctggatacaatttccctggatgtagatgccacgtctctttatctgcccgtccgtccgtggatgtaggtgccacgtctgtttatccgtctgtggatataggtgccacatctgtttatccatccatccgtccgtgaatgtaggtgccatgtctgtttatccatccatccatccgtggatgtaggtgccacgtctatttatccatccatctgtggatgtaggtgccacgtctgtttgtccttctgtctgtccgtggatgtaggtgccacgtctcttcgtccatccatccgtctgtggacgtaggtgccatgtctgtttacccatccatccgtccatggatgtaggtgccacatctgtttatccatccgtccgtggatgtaggtgccatatctgtttgtccacccacccgtggatgtagctgccacgtctgtttatccgcctgtccatctgtggatgtagctgccatgtctatttatccatccgtccgtggatgtaggtgccacgtctgtttatccatccgttcgtggatgtaggtgccacgtctgtttattcatccgtttgtggatgtagctgccacgtctgtttatccatccatccgcggatgtaggtgccacgtctgtttatccatccattcatggatgtaggtgccatgtctgtttatccgtccgtccgtggatgtaggtgccatgtctgtttatccgtctgtccgtccgtccatccgtgcacatttgggttgtttccacccaaaacgctcttgcctttcgttgagaaaaagaaccttgtccctgaggatggagacagcacagcctccttctctccagacccaagctctgtcccccacctgcctcccagctgtaatagatgagcaggacccgtgaccctagggcatgactggtcactattagtctcctgtagttgaagcacacagttgggccccctgcctcggccttctctccccctcccggccaagtgtccctgccccttgaccccttcacccttcttcctgggtcagctctttcctcccctggtcagtggtttaggtgcatcgaatgcagacgcagtcaccctgaggccgcgggaacaacctctggtcccttgacttcttggcatctcagtttcttcttttatttatttacttatttatatttatttgagatggagtctctctctgtcgcccaggctgagtgtaatggcgcagtcttggctcactgcaacctccgtctcccgggttcaagtgattctcctgtctcagtctcctggttagctgggattaaaggcgcccgccaccatgcccagctaattttcgtatttttagtagagacggggttttgccatgttggccaggctggtctcgaactcctgaccttgtgatccacccgcctcagcctcccaaagtgctgggatgacaggcgtgagccaccgcacccggccaagtttctttattgattcagtgggggtaactattcctaccccaccttcagcactggcttaaaggatctcacatacctggaagagccagtcggtgctgtgacgtgtgcgtccacgctttcacctgttcactcacttgtttctgtttacgatacatcctctgaatggcaggccctgggctgtgggtacaaagaatgaccaggacctcaccgtctggtaaagaaaacaagagaacttaggccaggcacggtggttcatgcctgtaatcccagcactttaggaggccgaggcgggcggatcatgaggtcaggagttcgagaccagcctggccaacatggtgaaacgccgtctctactaaaaatagaaaaatcagccgggcgtgatggtgcgctcctgtaatcccagctactcgggaggctgaggcaggagaatggtgtgaaccaggacccaggaggtggaggttgcggtgagccgagattgcgccattacactccagcctgggctacagagcgagactctgtctcaaaaaaaggaaaacgagaacttggatcgttagccagtgttgccggggttttgaggccagacagatcttgcggggctgagtctagctttctccatcgttagttgggagaacagagcgagtatctttgcctctgagcctcagcttcctgacctgtcagatgggctgtaagaggactgaatgtgagggtccatgaaaccctggacccggggcctggcatggagtcagtacgtggtttgccctaagctggcgggttcaggcaccctgtcccccacccccttccagtggttctgggtgtcacttgtccagcagccccctcctaaaggctgtcacctataagtggtcccctgggtcggggcctttggctggccgaggcagcattattttcttaagctgatggggtcagactggctttgctgaaccaacctcatagcaggggcggggaagtcaaggctggggccctcaatgccggctggcccgaggtttccctgccatgacccagcacggcagctctgagcttggcctggtgtggtcggaaacaaggggcctttgtcagcggctggggagcagcttctggtttcaattactctggagagcacgaggaagcttgcagagaacgtggggccggagcccgccagggcaggagtcaagggctcccctgccccacttccctccctctgacccccaaggggtgtcttgtccccattcgaccctgcctgagggtcctgcgcgtgcgtcctgggggccctgggttgtgagcccagagccccttccagctccggccccctctcgttcttcatagtggtactgggacccctcccaggaagatgatcgacggccggtaacgtgggtcctcagtgcttccccgttccaggcctcacgcgtgggccacactgaccacagccgggcccctggccctgagggaggccttgattcaactgggaaggaacacaggcctttccctttggttccatctctcccgtccccaacccctgccctggcactcacagcccccatagctccctgtcgtgggacaccggagtgacctctccctggaagatcagcccgcgtcggcgcccgccaaggccaggagtgcatgtcaggccccgcctcggctcctggcttaggagttccgcctccctgctgcttgccaccctcacagctggcccacgtggggctcttccctctgccgccacccccacccctgtgccagttccccaggcacatagggaccgtggaggctgagccccaggcctggttctacttcctgctgactctccacttcctcccagggccccgtgactgcagccattgtcctgctctggccctgcccaccccagctgtttcgggcacatttgttctccagcccagactcccacctgctgtccctcttcaaggcaggtctagacgcctggttctccttggagagtgggcagcagagactgtcctgggtgggggaagtcgggggagggtccctcgagagtgcctgccctgccgtcgaaagcttttccaaacgtggggcacgaacctctctcgtcagccctgctcagctgcctccatcgcccaggtgttcctgattttgggagcctggactctgcccagtggattctgggcaggaagcatccagcaggaagcagatggaggtgtgagtcggctccccccgctcccctccacccctgggaagtgccgcctcagcaggcaggcttggcgcccgctccccctgacccgcctctgaagggtgggcaccatgcagagaagccggtccagacaggacctcaggagccgatgcagtcaggccctgagaacatccagcctcccgacagaccaaaaaaaggtgttctcagctctgggtgccgggctcccagactcagaggcacgggacctgggtttgatcttagccggccaacctcgggtgacccttcagagagtgtcctctcgggtccgtggcattcagcgaactcgccgaggcgaaagccgcagacatagattcctccccgtgagccgctaacctccctgctggcggaggctgctgcttcctcctaggaatccaaaggatcagctccagggttgtcccactttccgtgttttctgaaagcttcaagagaaggatgccacagaagggttgccagagaatttcttgagttagggctgaggctgcagatgaatgctgagcgggggtcacctttagggtgggctctgctggcctccctcaagcctgcggccaccgcagactcacagcagcccctcgtggccagccccgcccttgccgtggcctgggggcgtggacattggtggtgctgggcgagggtctaagccccagtgtagcctgtagctttgggctggggcagggagggatgggcacaccgtgttcacgccctcggaggcaagtgctgagctgccctggcttcaggaaagaccctagcgcggctggagacgcaagatgacccagacacacccgcctgacccactagacaggtgctgtcccctctcgaggctgccagggcgaacccacagccactgagcaaaagccctgagtttcccaaaggagggagagaagcagagacacgactggagctgcaggttcagcgtctgacccagaggtgtccttacaaagcccctaatctctcagacccccacgtcccccaccccgagggagagcgaggccttcgggagaactgcctctaggagctgctgggaacctaaggtttgagctgtagatgcctgaaaggagggcggggcgctgaggtgtgcctcagattctgcctgtggggcgtgggaattccggggagggacgtgagccccaaggcaggcgaggggtggtggaaaagcaggtgtgagccagtgggccccacgtcccctcttcagccagggcgcctgctctctctgcttctgcttttatccgacgaggtgggcagggagacgtcggcataaaatttcatttggaaaaaacggcaggggtgcgtcctcagcagaaaagaaatctcaccggagaccatgtgtctgttccgagctcctgatttgacagctgtggaaactgaacccagagaaaaacacagccgttgagtccacaggtccctggctcccagggctttgcttctggccaccatgagctcggagcttgggtggaagggaggtgttcgggaatccagaatgaagaaagagcagggaggctcggcgaccccatcccaccttcaggcctcagcccctcctgcctcaggctgcaatttatggctgtgctgggagacccggccacaccccctccttcccgggaggaggagcaggcaagcagcccaggggggctccagcggtagggacagcatactgaggggccacgccctgcccactctgtccctgggtgagttttgttctagataagcaagatgttcccaaaggctcaagtgcatttttcacccttttccatgaccaaatgtgctgtgagaatcgctagggtttgccagggacgggctgtcgggacacttctcctgcagcagacaagctcttgggctgtttcagcctctcctccgtacctagaaccaccgagcaccctggcgacaccagcctgacgtggccagagagaggctggaggtcaggcagagggaggctggagctgtgtgagaagcagcacgtactcgggactgccctatgagccggcacaggcctttggggagttgggaggacagcaggttaccttgggcaggcctaggtctgggccgtagagcaactgatttcatcctgactgccttcttccttacactgtgcccatcttcaaccttgagcccaccctggacccctctcccagccccacctggatggatgggtgggtgggtggatggatggatggatggatggaaggatgggtgggtgggtggatggatgggtggatggatggatggatgggtggatggatggaaggaaggaaggatggaaggaaggaaggatggaaggaaggaaagaaagaaacaaacatagctcctagggtctaatctgccattggctgctgggtgactcctgtccccaggctgaatgcaggctctgaacattgcaaatacccagaggtatccgatgggtggggagaaaaacctagagtgagtctcagtgtctcattctgggaagacatttggccttccagtccgcaggttttggttagggtcggtacaggaaatggtcagaacacacagtaagaatgcagtgaccacagagccaccgagttgggggacactcccgtccccactcccccacagctgtccccggaacgtgccatcctcccgcccaactcgcacgccctgtgtgggcgctgggcaccccgggctcccatgctcggcctgcttgtctctctctcatcctggagcctgcacctgtctttgggcaggagccactggcaggctctctgcagcccccaaagcctcgggtccgccctgctctcctccagcaccttcttgccccccagcctcgggtccgccctgctctcctccagcaccttcttgtcccccagctctggtcctctgatgcccagccggtgccctgatcctctggtgctgagagagggagtgttcttggcagacctgagccacatcccctcggtccccatcctcagctgggtgccaggctcctcctgggctctggactctctgggcggcctcttggggctctccccgccccaactggctcccaggctatccccactggggcgcctgtggccttggtctagctggctgctcagaaaccccctctcctggagtcatttgcgctagcggataggacgaggaatcggggttcaagtgtgggctgggggagaggagcgtcgttctggtgggaaaaaggaggtcactccaggaaagcggcagctgcatttctaggttctgaggcagaaccttcctcctggtgctcacaggctggaggatttgcctggaagccgtccccacccccagctgtcaccgaggcagccccactgcagcctttgcccctcccgctcgcacagggcaggatgtgaccttttttcctcgttgatgccgccactgaacaccttaacccgattttacctcagtcacagctgtgctgggtggcatgaccccctccctaggtgtaatgcggggtcccacccacgtctccccggggacagcccctctcactccccttgcagagagcctggggaggggctgagggaggatgggatggtccactaggaatgtttttaattccaaaggcagtgacatctgttcgtgggggccttaccaccaggctctgtttatccagccgggggagtcttgcaggtcgtctgaggagggctctggcaggtgtgggggatggaaggggtggggggagcaggtgtgggggatggaaggggtggggggagcaggtgtgggggatggaaggggtggggggagcaggtgggggtagaaagggtggggggagcaggtgtgggggatggaaggggtggggggagcaggtgtgggggatggaaggggtgggggaacaggtgtgggggatggaaggggtggggggagcaggtgtaggggatggaaggggtgggggagcaggtgtgggggatggaaggggtgggggagcaggtgtagggggtggaaggggtgggggggagcaggtttaggggatggaaggagtgagggaggaaggagagtggccccttcccaggtggttgggatagcctgagctgaacccagcagagatgaggaggggtccgtggtgggctgcagcgactagaattcagacttctgcttttgctggggacatctgtcttgcacagatcttcttccacccaagaccattgactccaggaagcaatgagtcgggcttgggggagagaaggcaagtctgcgctgtccccagaggaagcccccagtccatagggaggaagggaaagatgagcgtctcaggggaagactcccaactcggctacccatctgcgaaggcacttatgtcaccatggagaccagctggccatcgttcatccagtccgagcttgctttacctagacaagtattgagcctgtggtacctaagacagatgagtgccgggccttgggaacgggattcacacggcccccttctcccccacacccggcggcagggaggggcgtgcattctcgcagtctgcaccctgtggcctgggacccagcccgagggaaggggaccataggccagtgaggggccgattctgaagttaagtcacggcaccaggagcactgtggcgcaaacgtggagagcagttataatggcatcctaccagccagttacatgacagccattgcacgtttgctggagggaggtagagtaaagctgggacccagtgagggtggatggcctttccctacagccccgagggccccacgctgacccctctcctccaggaagccttccccagttgcctccagctggaaattgtatctctcgatgttcgtggcattttgtctgtcctgttctgaggccgtaatatgggattttgtgcgggttttgtccatctgggcgtggtgcctagtaggtgcacaagtgacccgtgccaaatgcacaaatgcttgtctgcctcctgttgatggacatctctgctttcttggctgcccctttgtcaagcactgacttttgattcgtctctgtgatgccttaacccccaccccagggtcgggcacgcagccaggccctcagtcactacctctagagtgacatgagtggggccaggtgcagtggttcatgcctgtaaacccagcactgtgggaggctgaggtcaggagtttgagaccagcctggccagcatggtgaaacctcgtctctgcgaaaaatacaaaaattagccgggcgtggtggtgggtgtgtgtagtcccatctactcaaggggctgaggcaggagagttgcttgagctggggaggcggaggctgcagtgagccaagattgcaccactgcactccagcctgggcaacagagcaagacactgcctcaaaaaaaaaaaaaaaaaaatgacatgagtgggaccaagcagtggggcctgaggagtgagcagagccttcctggaggagatggctttgtggctgtgtgaaggggctgtctgggtcctcctggagccctggaaggggcaggcgaaggaggggtggagaagggtgactgaggcctcagttaggggacacaggcatgttcctacctccgtccgtctctccacctccccctcaggcggtgctggtgaggctgttgtggctcagcccccacttagcagctcaggtttgaggaagttccgtgtgcaccgtccaggggtgcgtgtgacgtgtgagccaggaagaagtggagctggtctggccgcccctgcagggacagtgaagactgaggcccggttctagcccaggcaggacgccccaaggcccccctccaccagccaggtggaagatagtccagggccagatcctgccacactagggcatcacagtgagtgacaggggtgtgggctttggagttagccagacctccgtttgtgttccagcttgtcctggccttggacacgtagctcagcttgtcagagcccttcgtttcctcagaggtaaagcggggatgctggtactgacttcatacagttgggaggggtaagtgacttaatccatgatgcctggtccctgccagccttccacgaaggacagctctgactacggctgtctctgcagggaagccacctattcctcaaaaacaccaaggcctctgaggagaaatcccgacacctgcctggctggtgacgccggatgccgagggctcgtctctgggccccgacccacctgccttggggtcaaccaagaaatgtcctgacccagctctttttcctgaatccaaagcatcatccatgtttgagtaaggcacagtgcttgtgagcaccaagggctttggagggacctccccatcctcacttggcactgtgtaaccctggcaagaactggacctcctgaccccctgtcctcacctctctagaacagggcagtaacaccaacatgacaagaatgtgaggctcacatgcagtcgggcgtttgaaagacctggttcgcggttgccacggtgcaaatactggtttcctttctgtgccgtgctggggtctgcagaggtccgaggccccagacacccctgggttttgcatagttaaacatttgggattcagcctttctcttttctctgaataccgtactctaacttgcactgttaccttgagacgtaatttgtgtcctagtctctgcggttagaaagttcactaaataaattgaaggtcaagaacaagttcttctctctctcaaggcgcccagcacggacacgggtggttgcccgtggcgtcctctgcgcccagcacggacgcgggtggttgcccgtggcgtcctctgcgcccagcacggacgcgggtggttgcccgtggcgtcctctgcccctggcagcggaaaccttttttggtgaggtgcaaagggccatggttcaaagtgacccctcaagaggcatctctggctggacgtgtgacccgcgtcgtttcgggcttttgctcctgtccctgagcagatcagtgacccgattcccactgggattcccacactaggggtctcctttatccttacatttctcacctgaggaggcttctgagtgccggtccacaagggtctggccgggtcaccaagctggctctgaggaaggtgcctggggcagaagttgggggtggggaagtgcgaccccagggcagtcagagtcttttgcccggggaggagggcagctgtttgtggccaaaatgcagcccccgcctggcccccggcccctccgcttggcccctggagcagcccggtgggcaacacggggacccagcagggagggactggggtgtggggctggtgtaaactttattgcgagggagggcggcggggtcggggaggagcagcgcccttgccagggatgaaacccggggttggggcttggaggggcggccctgggcctgggaggcggcgctcagcctgggctgcagcctcgcggagggcggggaaggagggatgcggaggagggaggagggaggagggacgcggacggagggagggagggaggggagcgcggggagggagggagggagggaggcgagcgcggggaaagccggcgggactagggaactagcgggactggcagccgggactgagcgctccacaggcgccttctctccagcgccgcgtcccgtcccccccggcatgaccgacgtcctgccccagcccgactgcagcccgaaggcggggcgcgaacccctggcgctggaggagtcggggagcaagcgcccccccaacaccggcgcccggctctggggccgcgtgcgcaacaagctgctccgaaacaaggtgcccgcgggggctggaggttccggggggtgggggctcgggggcgctgcggggctcggggggctgcgggggctgcgggggctgatggggtcccgctcccgccccctccgtggagtcccgggacagagctggggtctgtgcgcgtccctctaagtggcttgaacttgatggcgaacgctggggccgcccccacccggaccctggcgctcgggcatctgcccctgcctcgggagaagggaggtttcttctcggcaggtggaccctgctttccactccgggagtgcaaacagcgcacggggagacgcctgcctctgggtctatgtcttgccgccctgttcagcctctacctgatccctgcatccagcgggccttgctggctgcccctttgctgaggggcgccgaccgcagcaccgtctgccgtgtgaggtttctctgtgcaggattgtggggaggggagatgctgccgggtctgggggctcgaggcttcccttcagggaccacccatctgactgtgggcccagtgcccgccgggcaccaggcgttccgtccatgtgccagggcagaccgccggtgcccctgcagccccagacctgagttgggattaaaatctgagatagaagccgactgtcctgcagctgggcaggctgcctcggggctggcttggggccctggcatcaggcacgtgaggaagagccagacccagcgcccagcgcacaggaagtgctcgataactctgcagatcaaatcaactgtccgagttagctgtctcagagtgccagtccggctggccagggctgggcccatccatcaagagagcaacaagggaggccttggccagtccgtggtggggatctgcagctcctcctgaggctcacaggacctctctgcaggctcttactgccagccggcattgaggctcctggcatcagccaggacgaagtgatcttgggctcactggcccctcgttttgtttcagctcctgccatggggcatacttgacctcccagaggtgacatcagccctggaaagtgctgggcagggcagcaacttgagctgtactgcactggcccctgtgtcaccttcagcctccctggggactgggctagcagagccctgctggccccagctgctgccagagcccctctgtgctgaggcagctgtctgtgcccggcagcgtggactcatcccctccccagcccctgctgaggccagcaggcaccagcccagagctcaccatccatccccaaacgtcagggttggcaagaaactgacctggcaggttccgggtccagcgccagccaaacagggcgcttccagtttacctgcccctttgaggaggtgcctggtgggcagggggcaacttttaaacctgaggtcccagactttcagttctttccctatgcatttgtggccggcagaactgagaagccccttcaagaattccttagctgggtttgcctctggcagtgcctggtggctccgtgtctgatggggatctctgggcaggggtggtggccaggcagacgccgggctattgagctgctgagcagttggcgtcagtgcagctcagggtggccccggccctgggctgctctgtgtgacgagcgattccatcccctaacgtgtgctgtgtgccacagtgtgtccgtgtcgtggacgcaggggtcagcgctgtggcggacggagggacgtctgccacagtgtgtccgtgtcgtggacgcaggggtcagcgctgtggtggacggagggacgtctgccacagtgtgtccgtgtcgtggacacgggtcagcgctgtggtggacggagggacgtctgccctgtgcttcccacctcactgtgcgcaggccagcgggtgagcagcagagtcaaagggccaggcctcttgctttctatcctcagccacattaacctggcattttcctgcaggagcttcacagttgggccgaggggctgggactaggcagtttcgtttcggtggggtaagggaagggtgcctggtactgcccagactggcaggagggattgcctcattaactcctcgttaactttgccctgagtgatgctgtgggtgcgagaaacaccggtggccctcctgcttccactgacctgaaggttcattaaaggctggaggcggggcgtgactcatccagggctgggattaaacaatctgttcagatggaaaggtctcatgatcagaactgagcctttaaatagtgcagggcctctggtttctgggggagaggaggcagggacactcacggaggatcctttgggtaccagcgggggtccctgtggttgggctgttcttgtcaccggaggagagttcaggggccaaagcctcattccagcccctgacttggcagtcagctttttgtgcgagtgtttagctgggagacacgtggcatctgggtttgtgggttcagccagggctctcggtattgaacttcgcgtttctacttttctttccttttccctgtttgtttttttttttttttgcctcaaatcacactcaagtagaccaggcccggtgccttcctctccctcccatccttccctcttctagattcttggttgagctttggatgggaaggggctgaattctagattctcgcttgagctttggaggggaaggggctgaaggaggaacccccccaccctgcccccgcagcatccccttgtgggagccgtgaggaggctaagagggcctgaagggaggccggtccagaagcatttgtctgtcggggaagttgaggcccttatagagcaaccaagtccaagacgctcctgacccagaccaggccagatgctggccggcggtggggactcaggctgagccggcagggtgtaaggagattgagtgcagcttcaggtgaccttgtctctgccctgaagcacagccatgtgggtctgagaatcccctacttccaaagagctcctcttaagctggacaccggcactgctgacccccacggtgagtcccgtgttctgtgatgggagctgctgcctttgcttcagagaggatcagaggtgttacctgaggaagggcggggtggagagcccctcttgggccattcggggaagcttcaggctcatgatggtcttagaagaaggtccctttcttggatcacctgatgtcaggagtccaagaccagcctggccaacatggagaagccccgtctcaactaacaatgcaaaaattagccaagtgtggtggctcacgcctgtcatcccagcactttgggaggcagaggcgggtggatcacctgaggtcaggcgttcgagaccagcctggccaacatggtgaaaccccgtgtctactaaaaatacaaaaaaaaaaaaaatagccgggcatggtggcgggcacctgtaatcccagctgctagggaggctgaggcaggagcatcgcttgaacctgggaggtggaggttgcagtgagccgagatcatgccactgcactccagcctgggcaacagagcgagactcggtcttggggtggggggaggaaagggtccctttctttgtcagcttgatcgccaccgcaggacaaccccacccctcacagagcctgtcgtttattccttcttgatggtaccaggtgtgcagaccacgtgcacaccccagaggttcactctaccactcacttggccatcgagggtacacaggtgctgggtacaagatacagatatgtcttgggctcgtctactttattttataatccagtctgggcgtcaggaaagatctcgcagccttctgcaatagaagtctggcctggcccggctgcccaccgcccttccttgtttcccggtgggaagaaagcttcatcgtgcgtcttctctgttcacacacacccccatagcgacccctcagccacagacaggggactacagtgctgcctcccccgagagctggaggcccctacaccagcccacctcttcctgggcctatgtgtgggtcctgactgcggccaggctggctgacaggttggcagtggggtcgggcgaccctccctcttttccacagcacttacccacctgccgagtgggcagacctcactgctggggcctcatgagtactctctgatctctctgccaggccagctcccaagaggcttgcttgagtccgcagagcgggaaccctggactctgagaatctgatgaaggttctggaggccactcagacacagagccaccccatgcacacactgtgtgcgacttcagagggggctgcagacatcaaggcgggaaccctgctctgagtgaacttggcaaggtgccgcttcttggtacctagggagggtagaagggcgctggtcctccccggcctccctgcaggccacagacggcttggccagccagcggtgctgggcgcggtgccccagcttttggatggctctggaccagggagaggagaacctgccaatcaagggggttcctcaaaggccaaagctgcctgagcccagtgttgctgtagtacccagaggcaatgaggccccagacattttggaaggagcccccaagcctgcaggtgtggctgggggagctgccccaggcattttggaaggagcccccaagcctgcaggtgtgagtctgggggagctgccccaggcattttggaaggagcccccaagcctgcaggtgtgagtctgggggagctgccccaggcattttggaagcgcccccaagcctgcaggtgtgagtctgggggagctgccaggtgttggccacagggcgctggtgctggagaggcctggccctctgctgagtggcctcgctcactgcccaggtggttgggaactggtcagcaggtgctgttctttgacctcgtttcccctgtgaactcatgctggggcaggaagatgtttgtgtcctgacggccccccagcaccttcgaggaacagacagtcccctgcgcctgtgacctgcctgccccaccctggggagaaacgcagcgtcagtcctgggtccagtgagccgtagacccttggccctccaggatgggccctggagaggcgggaggggcccgtggagctggtcctgggcttctgtagagaggccaggaggccccaggatccccacagagacttccccagtcccgcttcaagacagcggaaccagctcctgagccgaaatctggagggatctcctttctggaccgtgaccccagccggggctggtaccgatgaccggcacagccagagccgtgacatccacagcgcccttcccatccgatgcctggatgccgtggctgtgctcggggaggcctccggggtccccagcccctcaggctcatgtggcacaaggtgccagagaagacagggcgccaggccggtgggagtcaaggtttcccatttttctcgtctcagtctgctacttaactgctgtgtgcccgcgagtacatccctttgcctctctggttctctggtatcagctcaatgaaggagctgaacaggatgatctcctggaatccagttcatgtgatgatcttggccatgtctcaagattcctagtcctaaaccttaaaccctgagcaccctgggagagtctgtcacagggctgcacctgggccaatgccagccattcagtggacacgggagcagggggtttagtgggaacacagggcttcttgagccctgtcctgaagcagccccggcggggagccattgtcacctccttcccccatgccccagttggttcctctggcctgtgagtattgccggagcaccttccacgtgccaggcctgcaggaactagggacacagaggcgcccgagacagacgagaccctgtctgcaggaggagtccgtcaacaaatgagatccttgccggtcagatgagtgctgtgaaaaaaataaacacaactgggtaacgcagtagagagtgacggggggatgcctggcttgagaggatcacttttgaacgaagatttaaatgacaagaagaattcagccataaaaaacctgggggcagtgcattccaggccaaagaaccggcaaggtccacaccccgaggcaggtgtgctcagaggcagagggggacagtgtggggcgttacgtggggtcaggggacggcggccaggcgacgtggggccctgcggttcaggacagggcctttaatccgaatgcagtgggaagccgcggggtgttcaagcacagttctgtgacgatatgttttgaacacgtactgtacgaggcatcattcttagcctgtgacgcaactgaggtgacacttacaaggtgctgttattcacactgtttatttatttatttgtttgggttcttttgtttttgtttgctgttgttgttttgagacagagtcttgctgtgtcgcccaggctggagtgcaatggcgcgatctcggctcgctgcagcctccgcctcccgggttcaagcgattctcctgcctcagcctcctgagtagctgggattacaggtgcccgccaccacgcccggccaagttttgtatttttttttttttttttttgagacggagtctcgctgtcgcccaggctggagtgcagtggcgcaatcttggctcactgcaggctccgccccctggggttcacgccattctcctgcctcagcctcccgagtagctgggactacaggcgcccgccacctcgcccagctaattttttgtatttttagtagagacggggtttcaccgtgttagccaggctggtcttgaactcctgacctcaggtgatccacccgcctcagcttcccaaagtgctgagattacaggcgtgagtcactgcgccaggcctaaatgtgttttgaattttgttttacatttttaattttttttttttttttttttgtgggagtctcactctctcgcccaggctggagtgcagtggcaccatctcggctcactgcagcctccatctcccaggctcaagcaatcctcccacctcagcctcccaagtagctgggtctacaggcatgtaccaacatgcctggctaatttttgtattttttgtaaagacgaggtttcgttatgttgcgcaggctgatgttgaacttctggcttcagtggatccacctgcctccgcctcccacagtgctggattacaggcgggagcccccgtgcctggcccagactgtttttatatatgaggaatgaggctcagagagtgactcagatgaagtcacgtgagtggcttagccgaggggcgacgttcagaccccggccactcagcctcagcgcaggctctcacccgcggtgtcctgccttccgtggccggttggggttgggctgcgtgccccagatgggagcgtctggagacgccgggctcctgcccgtcaggcatcagtgtggtgcccgtcctggcacgctgtgcatagcaacaggcaagacggttcttctcgacgacgccactgaacgtgagactcggagcaaggcaaggcctgggaggggccgctcagagctgacctgggccctggaattgctggagcccctcacgtccccggcagcaagctccatgcccagaaagtgttctgggcccgggcagggagggtgaagctggtatcagagaaggctgttgatgctgctttttttttttttttttttttttttgagatggagtctcgctctgtcgcccaggctggagtacaatggcacaatctcggctcaccgcaacctccgcctcctgggttcaagcggttctcctgcctcagccccctgagtagctgggtttacaggcatgtgccaccacgccggggtaatttttgtatttttagtagagacagggtttctccatgttggccaggctggtctcgaactcctgacctcaggtgatcctcccacctaggcctcccacagtgctgggattacaggtgtgaaccaccgcgcccagccctgttaatgtttcttaaccactccaggtccagctcgaggcttcagagcccatggaggtctgacaggtccttggccttcccgtggcctccagcgtgaagcttcctggtcaggaccacagaaggcctctcatcttggactttgacctctgagggcgcccctttcctttcaggacagggcctccgtgttgctttggccctggcctgttccttttctcaagagggccccactgcccctgcccttgccactctggcatcctcgacctgccctgggctggggcagggccggcttcctggctggtatttgtagcccagttctgagctgaagctgaagcctccaggctgcctgcacagggaggcagtggtggggtgggctggccctgaggaagacggagccctaggccgctgggggagatgtgcctggctgtggggcctccaagagcagcccaggtttggattttgtctgcttctcctcaaggtcagccatgcccagcccgggggctaaaagcaaagtgggtgccagggcaggcagaggctctggagtggacgtggggccggcagaggcgctggagtggacgtggggccggcagaggcgctggagtggacgtggggccggcagaggcgctgtagtggacgtggggccggcagaggctctgcagtggacgtggggccggcagaggcgctggagcggacgtggggcaggcagaggctctgcagtggacgtggggccggcagaggctctggagcggacgtggggcaggcagaggtgctagaatggacgctggggaaggcaggttgctgcgggtgctaagaggctagcctgccttggacaaaagcgtcgttcagagctgctaatccccttcctcccatgaggcttggggaacttcgaagttctctggtgttggaggggaagccagccgaggccctgggacacggcatcagcccgagcctatctgtggctggcctgggtatggcaggtgggcacaccttggctgcaggacaccttggctacaagggagcctggctgaccctgcagggtgagggctggagaggcggagcctgcctggcctagcagtgtggatgccaagccatgggaagatgtgtggagagtttatggagcctggcccggtgtccccaacccagctgctgagctggaagccaggggtaggtcctggcagcccctccctctctgccctgcctctctcggagtcgctcggagcagtcacgttgacggaatcctccggcgcctcctcgagggaggagaggcagggtcttggcaactcccgtctcccccgttgccagcttgccagccccgccgtgcctctcacgcctgtggtctgccccaatgacaggccggcttcggtgtcccaaggggacccagccctgagcgtggggctgcccttgggggagggcaggggaaagccagcccgggctgccaccgtggccgctggcctgggagccccaggaaacgtgcccaccctcagacccgatgcctggctcagggcctgggctccgcggcccctccagggcaggcgtgaaatgtgcccacacagctccaccttccacgtggttccctgtccgggggccacttgcactgaggtccttctggagtcattttctgtttttttttttttttttttgagacagagtcttgctctgttgcccaggctggagtgcagtggtgctatcttggctcactgcaacccctgcctcccgggttcaagtgatttccggctaattttgtatttttagtagagatggggtttcgtcaggttggccaggctggtctcgaactcctgagctcgagtgatccgcccgcctctgcctcccagagtgctgggattacaggcatgagccaccgcgcccggctgggagtcattttctagcgttcctgtcccacctctcaggaacagatttaccacctttgttgtgaagaagcattttttttttttttctgccgccaggctggagtgcagtggcacaatctcaactccggctcactgcaacctccgcctcccgggttcaagcgattctcctgcctcagcctccccagtagctgggattacaggcacccgccaccacgcctggctaatttttgtatttttagtagagacggggtttcgccacgttggtcaggttggtctcgatctcctgaccttgtgatccgcccgcctcggcctcccaaagtgctgggatgacaggcgtgagccaccgcacctggctgaagaagcacttttttttatgaacctctgcaaccccctctgagggaaaccctcccgcattctgggatgccggggctcagagggtggagggtagaagagcgccagccgtgagaggcaggatggggcggcccccgagggcagggctgtgcctggaggcagggctcctcggggggtcagctcctgggcggtgggagtgaccgagtgggctcctgagggaagcggctttcaggaaggaggcggaggcctgggagctcttggggccctggcaaatgtggtcttcagattcccgtcgtccagtgagcccctggatcacgtcctgagtggcgtccactgaaggctgcttgggacctctgctcccccctccactgagacccccagtggccagttctaagtcccacctgccttgggcagggccaccacaggccccttactgtggattaaagggccctgggtgagggcttgtgggaggggaggtggtggaaaccatctccgaagaccttggggcgagctgcgtgctggagtggagagtgtggcccagcaggcaggagcactgggttggaatgggggctctgccacctccgagggagcaggagtggagaccggagggagcgtgcccctgaatccgagcacggggagctggccgggagcagccctccgggcagaggcaggagaaatggggtcacctgccccagggggtgagaggtgagccgagaggaagggctgagaccctcaggggcatccccaggatgttcctgaaactcagccctggaggacgctcaggtgtgcgtggagcaccctctgccctggagcctcaaatcctctccccgctgcggggccactttgctgattcctgccccaaacatgaggtcacttcggtccagaaaggcgaggcgacctccaccagccacctacgggattcttggcagagaatccacgctcaccttcgggtcttcactcctgctccctcggaggtgacggagccccatttcaacccggtgcccctgcctgctgggttttcgccgcaggggacctggtcgtctcctggacatgagcccccagcgccagcgtttctctttgggagaggcctgaatgcgcagtcatgatttgaccaggcgaagtgcccagacaaagagaaaacagtcggccggatgcaggggctcacgcctggaatcccagcactttgggaggccgaggcgggtggatcacctgaggtcaggagttggagaccagcctggccaacacggtgaaaccccgtctctactaaaaatacaaaaattagccgggcgtggtggctcgtgcctgtagccccagctactcgggaggctgaggcaggagaatcgctcgaacccgaaggtggaggttgcagtgagctgagatcgcgccactgcactccagcctgggcgacagagtgcgactccgtctcaaaaaaaaaaaagaaggaaatagttgagctgctctcagtgaccatgtacggcccagtcgtcgacccctggcccagtcgttcgtccgccttttggctccacgatgttttgcagcctgtttctgtctcctgcctgtggcccaccttggggaggccccagtgctcgtgtgcccctggtggtcttcccagcctgacccttcacgagctccctctgtctccctgcttcaggtgatcagacatcccccaagtacctgctcccctgggcccatggaaggcacctgtctgctgggaccagagggtgagcagtcaggtgtcccatccaccaacgtcccaggggccagcccctccaccccggtgctaatctcatcaggaaatagcacagtccacatttcccaggagttataaatagccagcgcagttgcgggcagcagcgtttctctggaaaatgtacgctgtgcctctccctccctcctctgtgtttaaatgatatcctgaaatagacttggtttctggaggctgatagcctcctgggaaacagagcgtcgttgtcagggcaccgtggggccaggcaggcctctctgagcggataccagggccacacctgcagcaggcaccagggccacacctgcagcagataccagggccacacctgcagcaggcaccaggaagatgtcagggcttgaggggcttacagcttaggaaagtgcccctggcccaggcctggcctcagaaggggctggagtgtgtgagacagcagcaagtgtcgcctgggaggctgcagagggtagatcttagtggagcaggaaggcagagaggacccaaagtttcccactgtgacctggggctctccgagaaggctctctggaggaggcggggcgagaactgggccttagcatcaggaggtgcagtcctgggtcagatgtgcccaggttgaacctggcagctggagcggaagtgatgggcacgaggcagcgggagggctgtactgggggtggcctcccagcaccaggtctgcccaccgggtcgggacacacaccaggaggcccgatgttgcctttctgaggaagcagcagttacagcagctgcgggtcatggacttcacacattctgcagtttcagcagagagggtgctgggggccttgattttgaaccccagctctgacttcctaggtgtgcactgggtaaattcctcactctcgttaagctgcagcatcctcatctgtgagatgggagcggctatgagagcttaaaccgcatatgtctgctatcatgatcatgaacgcagatgctgtgtgtagaggattcatcagtgtcagacttgcaggaagagctcgagataagtccgttgctctcactcttccataacagccctgtgagtcaggtgtggatgcctccatgaggaaattgaagttcacggaggtgaaaggccttgcccgagtgcgcacggttgaatgggagactcagatcagcctgcctccaaatcctgcacactccccccgaccaggttgtgtccaggtccccctgagacttgggaagggaccattggctcagcttcctgcagaagctgccaggaggcacccagtcgtgggaagctggggcggaggaggggctgtgggtgaatcggaccaggggccatggaattggcctgaggcttatgctgatgtgtggagagacctgcctcaagaaggggtggtctcaaaacatcgaactgcgccccataaatacatacaactgcaatgtgtcaattaaaaaataagggcccgggccaggcgtggtggctcacgcccgtaatcccagcactttgggaggccgaggtgggcgaatcacgaggtcaggagatcaagaccatcctggctaacacggtgaaaccccgtctctactaaaaatacaaaaaattagccgggggtggtggcgggcgcctgtagtcccagctactcaggaggctgaggcaggagaatggcgtgaacccgggaggcggagcttgcagtgagccaggatcgcgccacagcactccagcctgggcgacagagcaagactccgtctcaaaaataaataaataaataaaaaataagggcccacacagtggtacatgcctgtaatgccagctcttcaggaggctgaggcaggaggatcactgaagcccagggcaacatagcagcctggacggcacagtgagaccctgtctctagaaaaataaatacaggccgagtgcggtggctcacgcctgtcatcccagcactttgggaggccaaggtgggcggaccacctgaggtctggagttcaagaccagcctgggcaacatggtgaaaccccatctctactaaaaataaaaaaattggccaggcatggtggctcacacttgtaatcccagcactttgggaggccaaggtgggtgggtcatttgaggtcaggagttcgagaccagcctggccaacatggtgaaaccctgtctctactaaaaatacaaaaattagccgggtgtgatggtgcgcacctgtagtcccagctaattgggaggctgaggcagaagaatcggttgaacctgggagacgggttgcagtcagccgagatcacaccactgcactccagcctgggcaacaagagtgaaactctgtctcaaaaaaaaaaaaaaaaaaaaaagagggcatggccgctccagaatgtttcttccaagggtagcatctcagttgacaaagagcatttgattcctccaccctgtgtggctactgctgggggacagagctggggacagacccaggcccggctccgtgtccagacgagatgaaggaactacgagggacagcctgtgtgatccaggagggtttgcaaagaacagaagcagcttagaggggagagaggtttcgggaaagtaaggccagagctggggcttcctttgagaccctgtaggacccctgcctccagccgggctggtgatggcctcacgcttcccgtgtgtgaagaggtgcccggagcagtggttctccctgaggggcacttggttctctgcacacacccaacttctgtctcctgttctgggttccatcccttctctgggcagggcgaacccagtgcagacccagaccccgtcggaggcttgggtaccacctgcccccagccggtgtgtgggtgatagatgtgggaaggacctacatcgagctgcaggaagcccaaggctgacccagatccagtttcccttccgtgatgacagtggcctgttatagcaactgcgttcaaaccgtggcacgcacacctcagagtgcacagagacgttctgagggcgacgtgggcaggagagttttcaggaaatcagtttgcagattctcagctgccataggtgctattgccagaaagccatctgcctgagagccagcatctcgccatcctgtcctctgcagaggagaggcctgaggctggctgtcggggcttggcccggggtgcgcagacctcctgggtggggaacagaggggcttttagaaatgttggggtaggggccaggcatggtgggtcacacctgtaatcccagcactttgggaggccgaggcaggtggatcgcctgaggtcaggagctcgagaccagcctggccaacatggtgaaaccccatctccactacaaataaaaaattagctgggcgtggtggcaggcacctgtaatcccagctactcgggaggctgaggcaggagaatcacttgaacccgggaggtggagcttgcagtgagccgagactgcaccactgcactccagcctgggcgacagagcgagactccgtctcaaaaaaaaaaaaaaaaagaaacgttggggtcagtgttcagaaagtaaaagactctagtggccacttagaacctttcaaaagtcaggtggtatccagttctttgccttccacaaaactgatggaggactcaattttcaactgagagatcatttcaagtaattttcagtaataggtatatatgcgatttaaggcggatagcatggagagaggttaaagaatggtgtaacgcggctgtgataaaactcttttcgacctcatctacttctttatgtgaacaaaatgtttcattgttcacatatttcttgttcattttagagacatggtcctacattgcccaggctggtctcgaactcctgggctcaagtggtcctgtggctgggagccacagcacctgcacatctttacaacaaaaccagaaacatgaaccaaattgatgctgagcctcgtttcactctagcaaaaaataataccctatagatacgcgaactaaagcaaaaaatgttccgcccatctcattgagagagcattccaccaaaaagttactctgctacttaatatttattaaaatgtataatgaggccaggcgcggtggctcacgcctgtaatcccagcactttgggagaccgaggcgggtggatcacctgaggtcgggagttcgagatcagcctgaccaacatggagaaaccccatctctactaaaaatacaaaaaattagccgggtgtggttgtgtgtgtctgtaattccagctactcgggaggctgaggcaggagaatcgcttgaacccaggaggcggaggttgctgtgagccaagatcgcaccattgcactccggcctggacaataagagcgaaactctgtctcaaaaaaataaataaaatgtatataatgtgtcggcttactttttttttttttttcttgagacagggtctcactctgtcgccaggctggagtgcagtggtgtgatcttggctcaatgcaacctccacctcctgggttcaagcgattcttccatctcagcctcccaagtagtagcttggactacagtgcccgccaccacacccggctcacttttgtatttttagtagagacagggttttgtcatgttggccaggctggtctcgaattcctgacctcaggtgatccaccagcctcagcctcccaaagtgctgggattacaggcgtgagccaccgtgcctggctgtctttttaattatgtactgccaatcatggtactaactaatcctgaatatattttgaatatttggagccttgtggtctctggaaatttttgttttcaatgtatacagattttttttgtggaagcaaaatgtaatggtgaataaaggacttgaaaatataaaaatataaactaggacaacattctttaggagaaatggaatagaaacaaattcaaggagagaagatccaggagctctgtgagggaaagaagagcttgtttgtgtagttttttgttgttgttgttttttttgagacggagtctcactctgtcgcccaggctggagtgcagtggtgtgatctccgctcactgcaacctccacctactgggttcatgccattctcctgcctcagcctccccagcagctgggactacaggcgcccaccaccgcgcccggctaattttttgtatttttttttttttagtagagacggggtttcaccgtgttagccaggatggtctcgatctcctgacctcgtgatccgcctccctcggcctcccaaagtgctgggattacaggcatgagccaccgtgcctggcctgttttcttaatattgaattttgagagttttatataataagccctgaaattgggtaatattagccctatagctgtgttctttttcaacattgtttagatgttttttctttttttttgagacggagtctcgctctgtcgcccaggctggagtgcagtggcgcgatctcggctcactgcaagctctgcctcccgggttcacgctattctcctgcctcagcctcccaagtagctgggactacaggcgcccgccaccacgcccggctaattttttgtatttttagtagagacggggtttcaccgtgttagccaggatggtctcgatctcctgagctcgtgatctgcctgccttggcctctcaaagtgctgggattacaggcgtgagccgccacgcctggcctcgtgtagtttttaaatggatgagtgtgggtatcacgtcgctggggtatttagatcccactgaatccatgagaaggaatgatgtcacacttttattttaggatggcaatattgacatgattttggaaatcatactctttgcaactatttaaacttggaaatgttcagattttgacttcagaaagtgccagggagcgcacagttgctcagaattagttcgcaggtgcacaggcagacgggcgcgaaggcccccgagttacagaaacagaacgtggaacagtcctgtgtgagggttgcctctgacctcccctggggtccgcacctccctgggctccagcccgagcctggggacttcccctgtggaggatttgcttatttgggagccaatggcttgacccaagttttctccctgaatcttcccagcaatcccagggaggcaggttctgttgcagatggaataactgaggcttagtgagtttaaaacttgccaggattcaaacccaggcagcctcctgtgcgcgggctcctgactcttcaacacctccacgtggatgggctggttccctcctgatggacttgagcgcctcctaatcaggtgcttaccttttgtgagcctcagtttctgcatctgtgaaatggggtaataatacccatgtcccgggctggcagccaggagtgcctaacagggtgtgccctgcctcccccacggtgggtaacagagtgtgccctgcctcccccacggcgggtaacagggtgtgccctgcctcccccacggcgggtaacagggtgtgccctgcctcccccacggcggccacaggggcctgggggctagggtccccccaaagggttgatttccaggtaaacatcagcttatcccagctgctcacttccgccttcctgactgtgtagctggctctgagcagtgctgacccacggggagatctctggcttggcctccgagctggcacctctctcacccacattctctctctgcagctggacccacaaaccgtggagaccaagaactggcacacggacgtgattgagatgaacggggtgagccggggatgggaatgatcagtggcgtgagccgggaggtggaacgtctgtgcagcaggtgggcagcccggccctgtggctgctcctggggccgctgtgccgcctcgacctccccgcagcccagccccctctcccctcctgcccacaccctgcccgctgctgtcctgcaggtgttgtgttgagggagacctgggtgtgagctagccctcatttgcagtcttggggaggggacccctgtgttttgggggcattcctcgggcactcacaccctggggaatctttacctgcctcaccccccaaccagatcaaagtggaattttccatgaaattcaccagccgagatatgagcctgaagaggaccccgtccaaaaagcagaccggcgtcttcggtgtgaagatcagcgtggtgacgaagtaggtgctgcctcgggtctcccagtcctggcgtcggtgccccgggtcccccccagcccgggccccccagccctccccgccggtgcccatcctggcacctaatcagttaccccccgctcggcggtggcagatggccggtgtggatctagagtggccgcagaggcgctcacaggacacttcagaagcacgcgagccagcacctaaacgctggaaggtctcttgtgagatcccagatcgtctgctcctcgtaacaagcgggaagctctgtcagccgggggcctacgtttgggctcggcaccaacggggactggcggcccctcgggaaagggcacgtgtcccccggttcaccaccaccctggccccttgtctcaggcctgacccacctcctcatgtgggctgcctgctgggcctcctacaagcatctgaatctgggggacgttctttccctagagtctcggccttaccttcccaagttcccaaggcttctcctgcccacgtccgtcgatgccccttcggcaggcctcgggtgggctggctggggtggggtgcggtggcctctttctctgccctgcccctgcccccgccccagctctccatcccaaatgctagaagctctccagggtgtgtgtgtgctgggtgggggttgctacgggagagctgtcgtgggggctgccctccacccatcctcacgctccaccccaggcgggagcgctccaaggtgccctacatcgtccggcagtgtgtggaggaggtggagaagaggggtatcgaggaggttggcatctacaggatatcgggcgtggccacggacatccaggcgctcaaggccgtcttcgatgccagtgagtctgggaggcccagccggggcaggtgtggctgtgtctgagcaggctggtgggatggacaggagagctcgggggaaccaggagcctccctggagaggaggcttgctctgcttcagagtccccgtggcaagtgctttctcttgtaatcccctcccctccaatctcttgtcccttgctgcaggtaagcaactgcagaaactcacaagggccgactcacttgcccaggatgacccaacttgtaggttttggttctggacttaaaactcagatctgactccagtgtctttcttgctagttcctgggtgcctggtgagccgcagggaaagagctttgagcctgcacctgctgtctccagggccccaggtcccctctggggcagtgctgcctctgcgtgaagcccaccatggtgaggcctgacctttctggtttctcctccctgctcctgctggttcaggtgcagcagccacataccccactgtcaagaaacctgcactggccaggcagggatgaatccgtggggagcctggagtggaggacggggtggggcctgggaactggccggcgttggtgcctctgtgcagcctagaagctgaggctttgtcggaacatgcttttacgtgtgaaaagtgtgcaatgccttccagagaggggcttagcgatggagaggttccagtcggaaggaagctgcaggccacatggtatgaatgtggctctgaactctgggtgatggatttcactccccaaacaccctttcccaagcagccacagcagatggcccccaggctatctctccctgttcccccaaccccgacccacagagccgagtcacagacacctgtgggccctctctacatcctgctcttccaggggagaccagaaccagagctggagtgggtgggggctgtgtcaggatgggtcgggggtggaacggggctgctggcccagctaaggctgcctgacctcggccccacccctgcagataacaaggacatcctgctgatgctgagtgacatggacatcaacgccatcgccgggacgctcaagctgtacttccgggaactgcccgagccgctcctcacggaccgactctacccagccttcatggagggcatcggtgaggccctgagggctcctaggactgggctgggccagactgagccaggactccctgcccggagaagtaaccagcaggagaaatatctgtggcttcctttgctggctgaccttcccagtgcactggggcctgtggctgaggggtccgagggtgaggtgtggcctgctgggacctggtgcagacactgggccctttctcgcctgcctcttgcccctgatgtccccatgggcagccccttctgcttcctatttggacgttggcctcttgcttggaagctcgagcatccagggaagactgccctgaggtgagtggccagaagccagcatcccagaaccaaggaggaggctggcttaagccatagggcactcgagatgggttgtgctgagccttccagcgggaccacacaccgtcccgtcacctctgcggagggccccggccagcaggccttccgcctccacccacctgggccaaacccagccccaaggaatcccttcagccttctctgctcctggggcagactggagcttcagcccccacggaaggctgcttgcacccacgctccagcagcagaaggggtggagaaagagaatccaccgctggcaggatatgtccctactggcttaaccttagccacacagaccagggggtgtcctgttacgagacaggggatgccccagcacccaaggcctatgcagtcagctgcaggaagggggtctgctcccaccagccggcctcctggctgagttaccagtcgtggtggggcctcctggaggaagcagctgctgacagcccacccagacaccaggccctcccctgtggggtctgctccccaaaggcctggaagcctgggctctctcccgcaggggcccacagcctcacgaccacaggggccctggcggggagccccaggagccaaacgccacactggcccttctctcccacagccctgtcagaccctgctgccaaggaaaactgcatgatgcacctgctccgctccctgcccgaccccaacctcatcaccttcctcttcctgctggaacacttgaaaaggtaacggggagcggccccaaccccacctcctcagtccctcctcatgaaaaggtaacggggaggggccccaaccccacctcctcagtccctcctcgtgaaaaggtaacggggagtggccccaaccccacctcctcagtccctcctcgtgggcgctggcctccatcgggctgtctgtggggagtgagagtttgctttccaagttcttgcactcatgtttttctgttttgagaaatatttgggtcccgtaaccagtagtaacctcaaatattgaccatagaatgctcagaatggcagggtgagagcccaggactacaggcaggttttataatcagtgggtcccaacctactggtggttcattcaacgaatgtagccatttctagatgcagtggggggtggacagcagtggggggtggacagcagtggggggtggacagcagtggggaatggacagtagtggggatggacagcagtgggggaatggacagcagtggggatggacagcagtgggggacagacagcaggaggatacattgtaagccttgatgcaggtgctgcttttcagttacatagagacgtgtggactgtgttacagcatgggttgtattgtgggccacagtcaaaaaaggtgaaacccactggtcttggcccacacctcactagacatagggaaactgagtccccacaccaggcggagacttgcttgggttagtagcagacctgtccttagagccctcaacttccagatcctaaattcagacccttcttgccttcccaccaccctttctagtcaggtccaaccaagagtggctaaagttggttgtacttgtagcaaagttcagaggtcctcaggcttgcgtggggaggtggtccctgggcgtcccttaaacccacctgcacgccaggaccggggagccccctcagactgctctgcggaacaattcttccctgagctcagccccagctcagggccaggccccccgctgcagctcagccacgccaggctcgggagagccagtggagacctggacgcgcccggggctggtgtcttgtttttcccatcatgaaacatttttcctctggtttggccaggactagagccccaaccaattccgaaagcatttggcaagccttgtggggaggagtgggaagggaaaattcattcggcttccaccctgggaactgggcacagtctgttcccacatctgggcccctggctggaccgtgtgcgcgcgtgtggtgaggggctggccccgctgcacagctgcctgttggcatcacagtgtttgtttgcctgtttccaaagcaggcgcagccacagctcctgcctggagggtgggaatgatggtattgagggtgagaggcgctgcttagggtgggtgggtctcagcccagaaacattttttgagactgaaggagaaccagaggccctctgatatgtttgctgaccctgggcctgcctggacaccagccctgatggcagctcctgctgttaccccagggaagcatcgcagagcatctggcctgttgagtaagagaagcaggagaggatccagagggaggacaatcctgggtcccacgaggcagacggagaggcataggaggcagccctgggtcccatgaggcagacccttccggagaggcacaagaggaagccctgggtcccacgaggccgacctttccggacaggcacggggggacagtccccgggctcatctggaagtagggctgctcctgccccagcacagctggcagagccccgggtctagctagtgactcctgctgggctccaggccctgcctgcctttctcccctgccccacccaccttaactcttcttttgggccacttagcacatgagaaagcaacagagcggtaggtcctggaggcagctaccggggttcaaatcccagctctaccagttgctggctgtgtgaccttgggcaagtcacttaacccctctgtacttcggtttcttcatctacacgatgggggtgacgataatcatatttacctcaaaggactgcggcgagtgtgagttgttccagggagttttcagaacagtatctgctctcaggcaagggagctggagttggcatctgtgggctccctggctctggcagttcaccatcagttcagggggacccagcagctggagatgttagcacagaacactggcacatggctggggccctgctctcctggatgagtccccttcccccgggggaggtccccactcctaggagacagagacgaggtgaccccttccaggagtccttcaggagttcccacagcgaaggccaagggtcctggagctccgagtggctgctgaggaagggcttctttcctccccatcttctccttcttagggttgccgagaaggagcccatcaacaaaatgtcacttcacaacctggctaccgtgtttggacccacgttactgagaccctcagaagtggagagcaaagcacacctcacctcggctgcggacatctggtcccatgacgtcatggcgcaggtaccctggcaccgcccgggcccgtggctggcggagggtgacggtcccatgacgtcatggcgcaggtaccctggcaccgcccgggcccgtggctggcggagggtgacggtcccatgacgtcatggcgcaggtaccctggcaccgcccgggcccgtggctggcggagggtgacggtcccatgacgtcatggcgtaggtaccctggcaccgcccgggcccgtggctggcggagggtgacggtcccatgacgtcatggcgcaggtaccctggcaccgcccgggcccgtggctggcggagggtgacggtcccatgacgtcatggcgcaggtaccctggcaccgcccgggcccgtggctggcggagggtgacggtcccatgacgtcatggcgcaggtaccctggcaccgcccgggcccgtggctggcggagggtgagaccagccccttaggaggagagagaacagctcagagtccccacacctcttccctcgtgggaagctgggttgatgggctatggggtgtcaccagggaggcaggactgtagacacttctgcccctcccaggccaaaacaaacatgtgagcctagaccagggcccagagatgctggctgcattctcaggagggcctcagtctcagaaagcaagcccaggggtggggagatgctgggcccttgtcctcatgggtggaagctctgaggttgcttccaagggcgggaggcttccctgggattcctgcaagacccagagcaggggccggactgtggccgcctcaggacagagcagaagcttatggccaggttggggaagtggccctaggcccccgaccctctgccccgtagcaccttccacggctgcagaaaggcaaacacacctgggctccccaggaaggggcggtggccggagccagtctagggagtgggaggggcaacacaggctggagtcagcaaggacgaggcctaggacagggagcccagcctccgccttcctgtctccccacaggtccaggtcctcctctactacctgcagcacccccccatttccttcgcagaactcaagcggaacacactgtacttctccaccgacgtgtagcccgaggcagggtggctgcgggcgggtggtggaaccagcccctccagcctggggtccaactcagacttgaaagactgcaatagaaaactcccaaacccagcactccagactcgagggaagccagcttccaagaactggaatgcgtacgtcttttgtgccaccttgtacaaagccggctgcccagccccagcctcaccaccgcatcccacctcctgccctccatacctctagttgtgtctgatgctccgtgctgttcgggaattgttttatgtacacttgtcaggcagaaaaggtagtgaccggcccggcgtgggcacacagacagcccgctttgttctttcatttcctccagcactttctttccgcctgagtccagcccaaggccttttattttgcgctgtgtaactgctgccagcttctctcttggccctgctcccagatggcggtctcctggcagcctcccctcagtcttcctccacccgctcttccttcccagcctgcctgcatgcatgtgcacccttggtcttcgctccatcgccttgaaagctctgaagaggccctgggttgccgcggcagcagtggtctgtttgatgctgccgtttgccgctgccggcccctcctcagactccgcctttgggagcacacctgctttgccttgctgcctgtgcaaatgttggacaagcagacacactcacactcgtccccagcttagcacagagctggagcgcccatttctggaattttccgtttgggaatctccacttctggggtttacctgttcggcctcctgtctatcagtgaggcatctctgactgtttcttctactgcttttcagttcccttccctgctgttctatttcctttgagtgtaaagactcacaggtgacctgctatcgagatagccagagggtcaggagagaatgggggaggaggcggtcaggctgctgaggaaacaccacaggctgaacgggggaggaatgcacatgccacgctgggtgtcccgggtcgcggggaggcagctcagctcttaggagcaagttgtgggggcttttcaagaggggccaggcttcctggagggtgactgatgtggccgaagcaggtgtccaggcaggtaggctgcagccaggagctccctggcaccgcaggacctcgtggtactcttgccttagattttacacacactccacagccaagcactgccacggtcctccaggacctgggaagcaaaggcacaggcccacggtggccagccattgtggtgccgccccagcttctggatacagccttttgggtaaacactgggaactccagaagttgtggggagagtggggaatcagacagccgcctctaggggctgggttctgctggggcctccttgttggtgctgtaggcacccgccagggagcagggacccgacttgcagacgcattgcccggtactaggaaggagtgaggtgtgttcccaccgtacacttcccacacgagctgcggctgccagcctcgggccatcagcctaggagagcagatgcagctccaggggctcgacttatagccagttacagctccccggctcttctgtgtggcagagcgtcgtttccgggccctcagggctggggagctcagttcccattgcttgtgctcagggctgagtcttaaagaagggtttgccggccctaacgctgcagcgcgtgcgcggtgagaggccctttttgagcctgtttactcctgtggccttgggcagaacagtaaatactctgtgcacggaggaaagacatgcccaagaggaaggaagtactgaccatcggctgcctgtgagcagcttagcaaggagcccttgctccctgggaaaggcggtgaacttgagtctaaagatgcagtgcctggcccttcctaaggtccctgcctggcatccgagtgtcggtgtgtggcacagaaggctcctgcttgcttccaaagtgatggacaggaaggggcagagtgagtcacggcccagactgggcaccttcgcgtctcagcctcagggagccccacagccccaagctcgctgaggcaacgtgagaacaggctatgggaaggctgcaaaggctgagaaatgcaaaggctcatatttataaatcccacccccagagtggggagggtcaggtgccagacctggactaaactgcaccaaggaaacacccagcagggtctcctgtgagccggggaccatgcagcccgaaacctccagtcactgcgcccggcaggagtcaggagccagggactgtgcagcctggaacctccagtcactgtgcccagcagggtgggctgtgcccagcaggagtcaggctaagaaacgccaggtctgcctgttcttgctgggcaatggctgatggctgccagtttctgctgatacacaggtaggatgggacccttcatgaatatctgactttaataagttggtaaggatatatttttttgtctatgttctgtttcaacttatgtagattattataaattgatgtaaaccacgtgagaggaaaatgttaataaaaaatgcaaagccccatcatttgcacaaaactca

SEQ ID NO: 435 - DNA, 188979 bp, Homo sapiens
  source 1..188979: mol_type = genomic DNA; note = NT_187613.1:c231744-42766 ABR [organism=Homo sapiens] [GeneID=29] [chromosome=17]
agcacacacggcccgaccggcagccccagagcagaggctccactgatggcaggcgcccctggctaggctctgaggttcctttgccctcgccttgctgaatggtgagccgctgcctctcggagcccgtctccttgacagcctgccctcggctcctgcagccactcctgggcctgatggggacagggccagcctggtgggtggtgtcagaggtcctggcagagcagcgtaggcctgggatgcgtctgcagaattctggctgaacgagcgaggagcacggccagcttcggggccgtcgtgaccacaggagggcagagggccagcccgtgagctctgaccccagctggacgtgctcttgtttcccttggggctaaggagattggagccactgaactgaatctctgggttttggagacttagagaatccattggactcttctgctggcgtctttctgaatgctgatggggacttggtggtaagtaaatgagtagggggctccaggccctgctgtcgagccctcggacggaccctttgggaaaactctgctgttgacctgtgggtggtgtcatctgagccatgtcaggtgagggccacgtgagctggggcttggcgagagaccctcctaaaacggtggctcggggagtgcataatctaagccagcggctctgcccaggatgctgcccttgctgtggcccctggccatgggaacggggcttcaactcggcccctgggaagtgtgtgggggcgtgtggggagtgtcacagctgcaaggacctgatgtcactgtgctttatcctgcagtgatgcctagggaggcagtgagggggtgaatgcagctccccggggagcaggtccacatcttgccagggcagcaggtcttcccatgactcaagctgacacaaaagtttggtgcagaaatgactaactgggaagggcttccagttcacctctgttgcctgtagatctcactggctgctggaaaagccgggaggctgagcagagggcaggtgagaagagggcaaaagacagactcataggctgagacttcacccttacaggtgacactgtggaggcctggggaattttcttctttccccagactggagggctgaggatgaatcttagaatagtaaatgctggccgcacatggtggctcacgcctgtaatcccagcactttgggaggtggaggcgggcggatcacctgaggttgggagttcgagaccagcctggccaacatggcgaaaccccatttctactaaaaatacaaaaaattggccaggtgtggtggcgggctcctgtaatcctagctactcgggaggctgaggcaggagaatcgcttgaacccaggaggcagaggttgcagtgagccgagatcctgccactgcactccagccaggcaataagagtgaaactccatctcaaaagaaagaaaaaaaagaatagtaaatgctgctttactgtaccaaggaaatgggaatagagcaaagcacggaaaacaggccaccccaggatctgacaggagagtttgtattctgctagtgctcataggaggcctggaggtcgtcttcttgatccacctgggcacataccttcttttttttttttttttttttttttttatttctttctgagacggagtctcactctgtcacccaggctggagtgcagtggcacgatctcggctcactgcaacctccacctcccaggttcaagcgattctcctgcctcagtctcccgagtagctgggattacaggtgcccgccaccacgcccagctaatttttgtatttttagtagagacggggtttcaccatgttggccaggctggtctcgaactcctgacctcaggtgacccgctggcctcggcctcccaaagtgctgggattacaggcgtgagccactgtgcctggccctgggcgcatactgtctacagatgtgaacactgaggctggaaactcttgagattggccggaggcattgaagaagtggggtttggccgggactggcatttgggagattgtcactggactttgttcagcttgtctccagggtcatctggcctgctgtagtagatatggttttcttgggataccagttctctttctactttatcatcagtggccctgggagggttctgaaataacgctgcctgcctccctcgtgtagctccgatttcttcctccctgagtttaacttcattctgtttattcattcattcactaattgccgctcaatgcagagattacacacgggaaccctggattcagacttggttcatttccaagcatcgccatctgctagttagccaatggcttagcctctctgcacctcaatttcttcttctgtgaaatggagataatagtaaattggcttattgtaaggattacgtgaaataacctacgtaaagcagatagagcagtgcctgacacttaagaagcactcagtagaccaggcacggtggctcacatctataatcccagcactttgggagggtgaggcaggaggatcagcttgaacccaggagttcaaggctgcagtgagctgtgagaatgcccactgcactccagactgggtgacagagcaagactctgtctcaaaaaaaaaaaagcactcaataactgttagctgtcattaattttatttgttcaatgtgcattattgaatgccgatctgctgggcgctcggcagaaagctgatctggaggcaccatgtggtcatagctgtgctgggagtctacctgagccttgttcacccactgcgctgagcactgggtctgcccagtgaggaagatgcagtcctggtttttttattttttatttttgagacggagtcttgctctgtccccaggctggagtgcagtggcgtgatctcagctcactgcaagctccacctcccaggttcacaccattctctcgcctcagcctcccgagtagctgggactacaggcgcccgccaccatgcccagctaatgttttgtatatttagtagggacggggtttccccgtgttagccaggatcgtctcgatctcctgacttcgtgatccacccacctcggcctcccagagtactgggattacaggcgtgagcaactgtgcccggctctggcttttttttttttgagagggagtctcactctgttgcccaggctggagtgcagtgacaggatctcggctcactgctgggattacaggcacatgcaccacgcctggctaatttttgtgtttttagtagagacggggtttcaccatgctggccaggatggtctcgaactcccagactcaggctatctgcccatctcggcctcccaaagtgctgggattacaggcatgagccaccgcgcctggccagtcccagcttttaaggacctgatgggccagtgagggtgcaaactctcggttttttggtcatcacagtctatttttggttttggtttttcatttgaatgtagagggccccactccctcccacccactgtgtattcagcctctgcacgcaccggggctccctgcctggcccccgcatgggaacatatttttgtcatcagcggtgacctctgggtgatcaaggaagcagagactcctggggccttcctgtcgtgtgcagtggagctgagctgctaacatgagaagggaggaaatgtggagatacccagttttggttctagggcccgtccccttttttctgtcctggccaagaaccaaggcttctaccttgattggtagaagcaagagttggtcgttggagaggccgtgagtagcacgtgcttgggaattaggagcagggcaaatagccttgaaaatgggatgtaccttcttcccactcagcccctcgtcattaacccagtgctcctggcggtgcacccaaccatgaaatcccctttaagtccagtgatgaggcaggagcaggcaggtcaccctggggttggagagccgcagacagtctgagtgcacaggctggagggagggctgggagggtggagagcactggccccagggactgtctggggaatgcttagaaggggcctggaggaggcagcgtgatagatgggggttcagtgccttggggagcactggctggtccccacccggtccacatttagctgaatcaggaaggtctgtctgccacagctccccgctcctctgacagattggggttgatcgctggggttagagcacttcagggtagcatcacctttggcaaagcccggaggagaaggactctttaactccttccttcccagcgcgtgacgttggatctccccaactcctcagtgccagggatgcggaggtttctgttcccacccaaatcactgtggtgctcaaaggctcacacacttgtctctgtggccaaggttagcatctggccgtggtgttaacatctactggaagccatccaacaaaggcatcaagggaatctcgaagtgactgccctttcctgagacacgttgtctgagacagacgtctggagatggaagagggttgacagggtttcccagagggtggtctctaaccccatggacccgcagagatttctcaggaccttcagcacccggtgatcaccagttagctggccgtggaggcagtatgcgtggtgtttaagagcatgaacaggccgggcgcggtggctcacgcctgtaatcccagcactttgggaggccgaggcgggcggatcacgaggtcaggagatcaagatcatcctggctaacaaggtgaaaccccgtctctactaaaaatacaaaaattagccaggcgtggtggcacgtgcctgtagtcccagctactcgggaggctgaggcaagagaatggcgtgaacccgggaggcggagcttgcagtgagccgagattgtgccactgcactccagcctgggcgacagagcgagactctgtctcaaaaacaaacaaacaaacaaacagaaaaagagcatgaacagagtgccagggttcaagtcccagccctcacttaccctctgagtgggttactcagctgctcagggcctcggttttctgacctggaaaatggagaaaacagagataacagtgacattcacggtgagatcacgctagtgaacgaaacgctaagccgggcacacagtcggtgttctgtgttcgttatcagaagtttcctctgtagagccctcaagatttgtctctccctctaccctctatcgtgttgtggagtggagggtccgagagtgccaggattggacagaatgtagacagaaaaaagcaaactatggcaacgcgaaggaaagcaactgccacattttagcttggaggatgctgaaaatagcttgttcaagcctttgtagataaaaatgtaaaatgtacgcaaatgtatgtgactcacgcagaagcatacatccatagctccctcacagtcagcgccggatgtggccatcaggaaaaccccacagtgtggggagagggcccgagcgttcttgcttgttgttgttttgaggaggggacggtgctgctgcctcctgggctggtggctcctggtggcggcagctcacgcccgtttccacctttcccctgggctgtcttccgagagttccaggtgggaagaagagatgcccttggcccctcatggctcctccggcctcgcggtcctccgagagcctgctcgttcccttcccatgccgaagctctatttctggagcgtctcattggagatgcacgccccctccctgccaagctccaggtgcctgcttggccctcccaatcctgtgtgctagtcagggacggtgggagggtgacagctgcagggaggggcggcaagagacagcgctggtgcctgagccaggaggattggggcggagggagccctggggacgcagggacgggctaataatattgaaaaccacttctgctgcagccacctgtagaggcttccccacccagagcatcatcctgtgcgtctcccaggggctccccagcctgtgatgagtgggtgacccccatctcccctggggcagctgcagaggcctctgcccaagcagcttatggggcttcctctcagcatcctgggggaggagctgcttctccccttaagaactagatgtgtgtgtgtctgtttggagtgatgaggaccgacccccacacccctccagcgttctgcgggtgccgaccacactgcccccggcaaaggccaggctgacttaaccttcctggtaggcctctgtagggctgggctcccagaagttttccccttaagctgcctggggatggggtggggtggagacagctccggtatctgaaatgtcactatctggggtaccgggccccctgggtgggccccactgcttccctttccctgggttcaggaaggggcttcagccccactgccctggacccccctggcctgactcccctcctgtccttccctgctccagggtcgcttggcccaaagaggtctgtggggaagctgccatggctcccacagaatcagcccacaggagacaggcatggggcccccaatctcttcactgcccttgggcgagggggtcttccttagagggaatttcgtctctaaacggtcatttctcaggcctcttgacccgacttcccaccatttctaggtgatgatgcaaacacgatgggctttccaggccgcggctcggggtccccaggaggggtcctggaggggaacgcgtggagcccttggggcttctcctggctccagtttgtcctccgcccaggaggggcacatgtgggactgtcctggccccacagcccccgtgacttcggtcctcccgggtctccacccgcccccctccatgtgtggcgggaacggccgcgctcagaggtcaggggtgtggaaagggacgagcgggggaaggttcgggaggagagaggcgcgtcccgcggcgcgcaggacgttcaccccgtgggtcccgcagcgggtctggctggggaggggcccggccgccgctcccgcccgcgaagccgcgcttggagatcccgggcgggaggtgatgtcacccctgtgggctcccgggccccccacggcacctggtttgcggatcgccaggatcctgctgagcccggcgcgggggggacgagggggacctgggtctgcgccgccgcctggagaccccccgagacccccgcggcccctcctcgcccagcgccggagccccgctgcccccttagcccggccgggggcgtcctgcggagggcggagcctcgagccgattggtccctccccgccccgcccccgcaccaaagccccgcccccgcaccaaagccccgccccaccacgaagccccacccccgccccgccccccgcgaagttgctcatcggttccgggatccgcagctgggctcggcgcggccgctggggccgggagggttcgggagggttttgggggctcccgccccgccctcgcccctgccccggccgccccgcgctcctcccggggacctggttcccggcctcctcgcccctccgcgctcgcaacttcggcctcccccggctcccgcccgctctccctcctttgttgcgcgatgagggtcgggtttcggatctgaccgagccgccgccgcgggatggagccgctcagccaccggggcctgccgcgcctgtcctggatcgacaccctctacagcagtacgtgtgccgggcgggggcgggaccccaggatcgggatcgggaccccaggatggagatcgggaccccaggatcgggatcgggaccccaagatcgggatcgggacccaggcaccgggctggtccggggagcgcgggcgggggcgagatcggggtccggatcggggtcgggttgggaatcgggatcggggtcgggacccaggagccgggctggtctggggggcgcgggcggggggtccccagagaggattcctgcggtccgggggcggggaccgtgggcggaccgagccgagagctgcgtcccccctcccacctgttgtgaacccggcctccgcgagcctcaggggagggaggcccttctgggtgctgcccccgcccctggaccggcagcttctctgtccaggctgaagccgaaaggccgttttgggagcagtcgttggcacccgagtttgccaccccaggggcaccgggtcatgtgtggttcagggcccaggggttcggtgctggggtgggatcgggtgggaggggagacggggggtgcagatatccgcgggggccgtttggatgcgggagctgaaaatcccgggctcagcaatctttcctgccagcctcatcaccacccccaccctcatcatcaccaccaccctcagaagaaaaaaaaaacaaaccttctcgagttctccaccccctcgctcccaaatctctctggatcatgtgattgctcttgcatggccccgggggatgcgtaactgatcacgggtaatggtgtgggggggcttggggcgaaccgagagccgccccccgcccccaccaccgcaccttgctcctgctccgttgctagaaaggcaccgccccttctccccacccttccctgagacacctttcccgaaagctctcagggattaggaagagggtcctcctgggcttacatagtggatttcgcccttcctggcccacgtgagtgggaccctcccactctctcagcacatctcccaggcaggagttgggggaggcacgtggggccacgtggagcctggttcagcctgattctaggcactggatgccatggaacaggagcgttttctttctttttttttttttttgagacggagtctcggctctgtcgcccaggctggagtgcagtggcgcaatctccgctcattgcaacctctgcctcccgggttcaagtgattctcccgcctcagcctcctgagtagctgggattacaggtacccaccaccactctcggctaattttttgtatttttagtagagatggggtttcaccatgaggccaggctggtctcaaactcctgacctcaggtgatccacctgcctcagcctcccaaagtgctgggattacaggcgtgagccaacaagggcatttgtaagggtcatcccagctagagttccttgataagtcatatggggggggtggggggagtagagaagggtgatgccttgagccccaaagccttactctggaggctgtgtggtacccaacattcaacctctgacctcagcatccccttgggtccaggtcattccctgtatcttcttctccacccgcctcctcctccatccatgttccttcctctcctccccccaggagctgtccttgtgatggttcattctgctttggtttctcaacatcaaaggggcaaagccggatcccctgggcataggtcctgtgccaggtgccgccgctccatctgctccttcccctgcagaggccagcgtcgttgggtgaaggtcagggcccatggctgtgtggcatgtgcgtgcacgtgcgtctgcatgaatgggggcacacatctgttcggagcgcagatgcagatcagctcctgacccggaggcaggattagtggccctctcttagctgtgtgcttgcaaacagccgtcataacaatgcctcagattcacgcgtgcttatgttcctgagtgtttctggctctttgcaaaacccagttcttgtttccctatttcccgaagcctggaatcgtatggaaccctgtctctagctttctctgcagcagaagactcctctgagctgatcatttccaagtcttccataccccaccctcttcctcccacgcctggagcaaaaaagcaaaattgcctgaggccaccttgaaaattcctgaccagaggaatgccagaaaagggaattaggccaaggcctcttagggggttctgttgggcagccctgattcaggcagattggcacctgagctgtctaccctcctgctgctgccctggcctctgggcggctcctggggtggcctggatggtgggtgggagggggcactgatgtggccgcagtgtgaggagtccctgcctccctcttcggaacagcttagtggagagctgtagcaggaggcttcccggggaggtgctgtgcagtcatgtttgggctgttagccatcaactttcctcttgacaagagcctaaattaaaacaaatacccgagctgtcatttgcctggcagcaaggttttgtggctcccagaggaagttcctctgcttctcaggaagctgtttgcttacaaggctcacagtcctggggtgacaaatctccacaaatgccagatccatcgggaactgtaaagggggtatacccagggcacagggtggcagtgtgacttagagatgggaatgactcggtgttagaggttccctgccttcctctctctgagcattgttcctggtaacaatgataatagcgtctcctgagcacctactgtatggcaggcactgggatagtcactttctctttctttcttttttcttttttttttttgttttttgttttttgttttgttttgagacggggtctccgtctttgcccaggctggagtgcagtggtgcgatcttggctcactgcaacctccacctcctggattcaagcagttcccctgcctcagcctcctgagtagctgggattatgggcgcctgccaccacaacccagctaagttttgtatttttagtagagatggggtttcaccatattggtcaggctggtctcgaactcctgacctcaggtgatcttcccaccttggcctcccaaagtgctgggattactggcgtgagccactgcgcccggcctgtgctaggcactttctatccattctctccaaatctcacaactctgcaactcttacagagtaggaaagtgaggctcagttagcataaatcatagacctaagatcacataagtaacaaatggctgagctggaattcaggttgtaccctagaataatgaggaggatcccgagtaccacctgggtatgtctgagtttattcaaggtcttgggatgtcacggaatgggggacgccattctctatggtcctctgttgcagagttctccctgaaacggtccagcagggtaaatggcttcaatggctctgaccccaacctggccctgtgcctcttgcaggacctgggggctgggcctggagcccaggcagggacagctgaggctgtctgaacccactgaggctggtggctctctgctcctaaggtgccagcctgccagccagcccctcccctcacacacttcttttttttttttgacacggagtctcgctctttcacccaggctggagctggagtgcagtggcactatctcagctcgctgcaagctccacctcccaggttcacgccattctcctgcctcagcctcccgagtagctgggactgcaggcgcccgccaccacgcccggctaattttttgtgtttttagtagagacggggtttcaccgtgttggccaggatggtctcgatctcctgacctcgtgatccacccgcctcggcctcccaaagtgctgggattacaggcgtgagccaccgcgcccggccctgaacacacttcctgcctttggggttggcagttcattctttctggttttgacaggaggagtgtgcccacttccatcacaggtttggtggtcatttgatgagggttgggcagcaaaccctccatctctcctatggtagaagtcctgaagggctgcggtaagtgtgatttgtctgcctcaaggagaagagttggatcccagctgccaggggccctggggctgatgggagcagagtcctttccctgtggagtgacagatggtttcagacatcccccagttcttgtgtctgcgccactcatttgcctgtattaatgtagcaatgtcagtttcacccctcagtaccttacctttctctccctggggttgctatgatgctctctctgaggctctcttttttttgagacagagtctcgctctctcgcccaggctggagtgcggcggtgcgatctcggctcactgcaacctccgcctccccggttcaagcgattctcctgcctcagcctcctgagtagctgggattacaggtgcccgccaccacacccggctaatttttatatttttagtagagacggggtttcaccatgttggccaggctggcctccaactcctgacctcaggtgatccacccgcctcggcttcccaaagtgctgggatgacaggcgtgagcccctgcgcccggccatgttttcttggtcataatgcctctaggtctttaatcaccctttctgctaaacacgtatcatcttctctttgttatttttttattttatttttttatttttattttcccaatcccatgggattagattggattaaatgggagcggagtagcccaaaatgggggtggaggtgtgctctgacactttcttggtccctgggattctccaagcagatctggatcaagacatacgtgtgccccaggcaggttgatcatctggcacctcttcaactggaaaatctttatatgtgtgtttaggacttacttagaggagaggcagaggctgtatttaaagcctctccctttgccacttcggcctccatttggtcccaagtaatttagtcctggtgtcaaacataccttccctgctgagccaagcaagagcctgcagtggcttggccgtcatggaaggcagaacgtgaccatctgttgttactagagcctgctttttggagctcacttctcttaccccaagcaacatttccaagggcgatttcattctcttgtgatattttcatgccctttatagattcagtgccccatctatgggccaggaaagtatttggagcagtggagatgtaagcctgtctccaggtgagcatgagcctacctcagtttctcatctgagccccacattctctacaccagggaccaagccactggtctgacagcctgtgtgcgtttgatcagagcagttcagttctcggggccgcatcagacccctccgtgtgtgctagtgagcgcctgctggcagatgcttgcttgttttcggaatagcccagtaatttattcctttttgtcaacaccggcccataatcttcatggctgctggagtctcagaggtggggctggcagaagaattaagtcatctactcagagaaacttaggtttctgtggttgtgattgttggctactgttgttcttcgggaaaaggaaggaaatttgtggggaattggctggaagatgctgttaggaggatggaagatggggaatggcggggaggctctgcctcactcttgcgagtaggatggaagacttgttctctgtctgaggtatgatctgctttctgggacaattccggtaccttccttcgtagagggagggcatgatggctctcgtgggtgttgtgtggattaattcatatttataaagtgctttgaaggtgaggagagctattgagcagctcagctgtccagctcattgcgctcctcatccgggaaagcctcgagggactgggagaggccggcacaggacttaggaaggggcagggaatgtggcaggaggaccggcaggaacagggtatcagaccagctctgaggcagcgcctcccacagcggctcccgcacaggccctccataggtgttggttgtctgagtacgggtgggaaaaagaaaactcgagttcttggctccttgagctcctccccgcagcagaaacccctgttagctgaaacctgtcagctggcccgtccatgcgtttccggctgtgtggatttggtcattgtactcgctcgtagtggagtcagagacccccaaagggagtctcgcgcttttgccagggtttatgattggaggacttcactgccagcgttggcggcagctgtttggctgagcttgagccctttgggcgcaaacctagggcaggcggcttcaagacaaccctgcgcccactgcccctgccaggcccttggtggtggcgggtgttggtgatgtgtggggggtgggctgaggtgatgtgttgagtggactgaggtgatgtgttgggtgggctgaggtgatggggggggtggactgaggtgatgtgttgagtggactgaggtgatgtgttgggtgggctgaggtgatggggggggtggactgaggtgatgtgttgggtgggctgaggtgatgtgttgggtgggctgaggtgatggggggggtgggctgaggtgatgtgttgagtggactgaggtgatgtgttgggtgggctgaggtgatggggggggtggactgaggtgatgcgtgtggggggtggactgaggtgatgtgtggggggtggactgaggtgatgtgtggggggtggactgaggtgatgtgttgggtgggctgaggtgatgtgttgggtgggctgaggtgatgtgttgggtgggctgaggtgatgtgttgagtggactgaggtgatgtgttgcgttgactgaggtgatgtgttgggtggactgaggtgatgtgtggggggtagactgaggtgatgtgtggggggtggactgaggtgatgtgttgggtgggctgaggtgatgggggggggtggactgaggtgatgtgttgggtggactgaggtgatgtgttgggtgggctgaggtgatgtgttgggtggactgaggtgatgtgttgggtggactgaggtgatgtgttgggtgggctgaggtgatggggggggtggattacctgctctgttctatattcttggcacttttctccaagtgactgtttgtaccagggggagagttctgcagctcacccatctctggggctgtgataggggaggctgtttgtgacatgtgaccttggcttgtccccacatgtgagaaagtccattgctgctgtggggagtagcttgcttttcttttcttttttttttgagatggagtcttgctctgtcacccaggctggagtgcagtggggcaatctcggctccactgcaacctccacctcctgggttcaagcgattctcctgcctcagcctcctgagtagctgggattacaggcatgtgccaccacacccagctaatttttgtatttttagtagagacggggtttcaccatgttggccaggatggtctcgatctcgtgacctcgtgatccacccatctcggcctcccaaagtgctgggatgacaggtgtgagccaccgtgcccggcccaggagtagcttgcatttcttagggcaagatatggtcagttggggacatgacgctgctgggagcagcgggaatgttccactggtccctgaagcttgaggagaacctgacccagagaccttgtgaagggggaaggagaaagaaatcaggccaataggcaggctacggaaggcacccccgtatggaggctgaagataatgcccaatcccacccctgcctgggcatttggcaaagagccctttgaggcgggaccatctgaggccgtggccacttgtggatggagcagcgggttctctgtccccgggtcgagacctgactggggcctctcgcccagttttttgtccaggctttatcctgtgtcctcctcctgcccttccttcctccccacacacactagaccgaaagatgaatctgggtttactggctgtatggaaaatgtcagagtcagcctgggcttcagtagatagagccagatgtggtcggctctgtggtgacctgattgattaatcgggtgccactcccctctttcttcatttttttgagacagattttcactctcgttgcccaggctggagtgcagtggtgcgatctcggctcactgcaacctccgcctcccgggttcaagcagttctcctgcctcagcctcccgagtagctgggattacaggtgctgccaccacgcccggctaattttgtatttttagtagagaagggatttctccatgttgatcaggctggtctcgaactcctgacctcaggtgatccgcccacctcggcctcccaaagtgctgggattacaggcgtgagccaccgtgcctggcctcactcacctccttcttgtccctgccctcacctctgatgccttggtgtgcctctaggtcacaggtggacatggcacacgtgattgggcatcttgcctaaggctagcagggtctccaggaagtcttgggtggctgggaggcctcaggtaaaccagagccaaggaagctcagagtccttgtcactccgggcagcttggctgctggactccccggggcatcggtggagctggtgctgcctagagaagcctggtattgagcagggatctgtgggcttactcggggctgttggggaaggatgtggccatcattaccttcgtgggattgaagggctgcttctgtgagtgttctgggctaaccccttcctcctgggcagcggctcctggtcagcagcaaaggtttaatggatcgagattacggggaccaaagacgccgtgtaattaagccagttatttctctggctgggaacatctactcctcacagccgcaattgacttcgtcacttgtggttaccccgttcgcgttacctcgggcctaaacagcccatacgtcatctttttgagggagtctctcccttggaggcaaagttttaggagaaagatccctctgggagttgtagagtcggcgtggcagtgtgtgctattgaaggtgaagttttaggagagagacccctctgggagttgtggggtcagcgtggcagtgtgtgctatgcaagagtgccccctgcagttgttctgtgcaatggcgcccacgggagcctctttgggaactgtgtctgggttctgtagagggacatagatagaaacctcatccttgggtctcccaggatcctggggtcccgtgaaaagaaagtccatcagtcctgatggattcatagaaactagtttttaatttggtttagaaagaatggaagagacaggccaggcacggtggctcacgcctgtaatcccagcactttgggaggccgaggtgggtggatcacctgaggtcaggagttggagaccagcctgaccaacatgatgaaaccccgtttctactaaaatacaaaaattagccaggcatggtggcaggcacctagaatcccagctactcgggaggctgaggtaggagaattgcttgaatccgggaggcggaggttgtagtgacctgagatcacgctgttgcactccagcctgggcgacagaatgagactccatctcaaaataaataaataaatacataaacaaactaaattaattaattcaaggtcgcagactacaagccagggactgtgcgctcggttggccctgctgtaaactgtgttctttctcccgcactcttacccttcacagcggtgctggtgggggctccttgacgctggtatttcactgaggttgatggatctgggttcatttctctagctagaaagacagttgtgaagactgcgtcttgcccccaagcccccgtgatatgaggagacagccctctgccccaggcatcctggaagcactgggagcatccaccaactgggctgcctcttcctaggggcatgagcctaaggaggtctcctcatgggcacttggagcccacgtgcctgcattgctgtgttcctggaattattggcaagaagtgctgattgttaacatacacaaacacaccccccccccacacacacacacacaaacacaaacacaaacacacccccccatacaaacacaaacacagagaaagggagagtgagaatagactttggcggttgggatggagcagggccagtgcccagtttctagagcgaggccaggggcgaggacgcggggatttggcagagcccaagcgtgctggccctgctctccagccttttaaaatccacctccacatttcaaaaggaaaataaagagagccctcagccataaatcaggccactgagcatcgaggtcctttgccgaggcccagggcctgctgggctgcagagccagctgctgtgtttgaactctcccgcgcgcagcatgttaatgacggggcagaccctccagacccaggctcacacccacgacggccctcgagcccagagagtcccccacggagaggtcagcccctggggaaggcctgtgtctggggggcttacaccttagcggagccccctttggctgggacttcaaatcaagccagacccttctgtagctctggattctggccagatgaaaggtaacccctgacacagatcttttgagcccatttcccaataggaataaaagtaacaaagcaattgattggacacctcacgggtgcaagagtagagcgagcgttctcacattcgtgatctcatttcatcttcacagtaaacctatgaaaggttgttaccctgattttaaggataagaagggggattggccattgttcttggcctctgctggtgacttctgccatggggggcaccctgagggggacgcaccaggtcttctctgccctcctctgctcaccctcttcctgcgtggcggaagctcaggcatcatctggctttgtgagtgcctctgtctagacaaaacccacgtcctccctccctcctctttcccctgcagggccagctttggtgttaatggagcagaaagccttggtagttactttgcgagtgcgtcacggggagggtcatgagagaccagctggcgtccacccagccgcgtggaacagccaccttgacttggtcgaggccagcaagcgtcttgcagaccccgtggcagctcctgacccacgttcccccttgggaggcctggatgagctggggcaccaagtgccatctttgggtgtagaatcttcagaaaccaaaggcaggagctgattcggtctcctgctccctgggaagaaaggatggaacgcacattggctgtcaggagagctgctgcttctagccggaggaccttgctgcagctggtcagctgccagcacagccaggcccttgttgtgggtgcctgccgtgtctgtcctcaagcccctccctgagtgaaggacactgttccctttccaactgcctgtggctgtgctagaccattttctctcctttgcccagaaaccttcagtgggttcagtggggcattgcctttcccaccacattcagtccagactgggggaacctcttgttatccattccagtttcccagcacactgcccattctctagccagtaaggcctctcaccatcctgcaaagctctgtgctccaaggatctaaccagcttcaagcctcagctcagctaccaccatctccaggaagtcctccaggcctgattcgagcactggccttagtgagatccctggctcagagtccctaatgctgattgctccggctcacatcgcttagcactttcttatctttttttttgagacagagtctcgctcttgtcgcccaggctggagtgcaatggtgcaatctccacaacctctgcagtgctcactgcaacttccacctccgggttccagtgattctcctgcctcagcctcccgagtagctgggattacaggtgtgcgccaccatgcccggctaaatttgtatttttagtagagacgggatttctctatattggtcaggctggtctcgaactcccgacctcaggttatctgcccacctcggcctcccaaagtgctgggattacaggcgtgcgccaccacgcccggctaatttttgtatttttagtagagacggggtttcaccatgttggccaggctgctttgaactcctgacctcaagtgatctgtccgcctcggcctcccaaagtgctgggattacaggcgtgagcgacccgcccggccgatatcgtgttgttttatagtgtttacctgcacagtgtttcatgccagttgtcatttcttctctgccagactctcaactccttagaggcacgagggagaataacaaaggcttccgtgataggatgccagacattgtcctctctgctttgctaacagtatctcatttagcctccggcaacctgctgagttcttagccatttttatcctgtttcatgcttccccaagacttcccagaggtcacacaacacatctgtcttgacgcctcagcctgtgttctttgccagaagcgcccaatgccagggcctggggcatgagacctcaggttggggcccaggcctctgcatgtctgaaaagctcctcggcttactccctccgctcgggggaccagcctttcaccatggtggttctcccttccccgcaacacccagctaggcaccgagcaggtggaaccctgggaaatgctgctttgtgattggttggagtcaggggtggctatgaagatgctgctttgtgattggttggagttgggggtggctatgaagagacgaagtgctctagggctctgggtgtctggatccagcactggggatgccccggagagtcctggagcagggaggatccaagcaggaggtggagctgggtgttaggagggcagaagggccatcagaaggggatactggagacatccaactggtggcctctctctccgcccagccagagctcaaggctttgcctcaccccgagaagataaatcactggggtatcacggggtcccccagcccccgtgccatgatggacatgcacattttgatttggcaggtccggagctcagattctgcatttcctttgtttgcttgtttgttgtttttgagacagagtctggctctgtcacccaggctggagtgcagtggcgcgatctcagctctcactgcagcctctgcctcccagttcaagcgattctcctgcctcagcctcccaagtagctgggactacaggcgcgtgccaccatgcccagctaatgtttctgtatttttagtagagacagggttacaccatgttggccaggctggtctcaaactcctgacctcaggtgatccgcccgcctcggcctcccaaagtgctgggattacaggcgtgagcccctgcgcccggcctggattctgcatttctagcaagtcccaggtgaggcccgcgctgcccacactggatgggaaggaccaggcgcctgcagcatctgccctccaagccttcgtagctccctccttcctgcaggataaactctaaactccttagcacaacgtgggagccttctcagagactgggtccaacccatctccagccgcagcctcccctcctggccccactgccacacccccgggcctctggccacactgagcctctcccggtttcccaggatacaacactcgcccattcatagtgtggtgccttttgcacgtgctgttcctctgcttggggatgctgttggtctttctcagccaggtgaagaggacgctgaatgtcacctgcttgagtatcaggaccggggactgggcactggacctagactcttggccctggagagaagccctgcatggggccgcagcctgcccccgtccctgctcacagaaaagctcagccttgcagccgcgtggagtcagacgacttgcctgtcctgctttgaacgtgtggtgttcctaccacctttgagtaaaaatagagctgagaatgaccgaagtgaaactccaccttgggctctgggagagcagaggtgggaccgcgctggggagggtgggtgcggacactccgggggcgggggctgaggccatctgcgtgggctctgggagagcggaggtggggaccgcgctggggagggtgggtgcggacactccggggggtgggagctgaggtcatctgcgtgggctctggggagggggccctgtgagccgggccaagctgccaggcactgggggtctacgccctggactcagagagaccatggcaccctcaaggctgctctcacttgaaaattttcgttttggggctggacatggtggcccacgcctgtaatcccagtactttgggaggctgaggcaggaggatcacctgaggtcatgagttcgagaccagcttgcctaacatggtgaaaccccgtctctactaaaatatacaaaaattagctgggcgtggtggtggatgcctgtaatcccagctactcgggaggctgaggcaggagaatcacttgaacccgggaggcggaggttgcagtgagctgagatcacaccattgcactccagcctgggcaacaagagcacaacttcgtctcagaaaaaagaaaaaaagaaagttttcactctgggctgtggaactatttcaggacttcctgaggggtttcctctggagcttcctgagtttcctcctggacattttgtctccaggtcccagcgccaggcaggggtggctcccggaagggctgtgggtgccaccctggctgactgcagccctctcttgcacctcctcccggccatccacccgcaggaggtcttcccccagcactggcttgtgaggagctccctctgcccgggagaaaatggctcctccgggtcacaggctcccctccagcgactgaggggcatttttggattgtgggaaggcgctccagggcccggttctgtggccccaggcctgttgctcggctgggtggaggcacctctgcaggccgggagcttggtctttgaacacctgcttagcctatgacctccagcaagttatttatgctctagtgagctgtgtttttctcacctttagaatgggaacaatcttaccaaccacactgaaagcactgctgagtttttcagcaaataaaaataaggatgccccgttaaattagaattttagatgaacaatgaataatttttaaatataagtatatcccatatggctgggcatattgggaggccaggaggatcacttgaggccaggagctcgagaccagcctgggcaacatagagagaacttgtctgtaataaaaatacaaaaaattagctgggagtggtggcagacacctgtagtcccagctcctacggaggctgaggtgggaggatggcttgagctggggaagtcgaggcttcagtgagctgagatcatgcctctgcactccagcctgggcaacagagtgagaccctgtctcaaaaaaagaaaagtaagtatatcccatacaaaacttaggacatagtagactgaaagctagtctgttgctcacccgacgttcatgttcactgggcgtcttgcattttatctgtagaccgaaagcttgtctgttgctcacctgacgttcatgttcactgggagtcttgcagtttatctggggtccctgagtctggattcagtgctgtgtgtgacactttgccagggtcccacctagatgctccgacatccatgttcactgggcgtcttgcagtttatctggggtccctgcgtctggattcagtgctgtgtgtgacactttgccagggtcccacctagatgctccgacatccatgttcactgggcgtcttgcagtttatctggggtccctgcgtctggattcagtgctgtgtgtgacactttgccagggtcccacctagatgctccgacatccatgttcactgggcgtcttgcagtttatctggggtccctgcgtctggattcagtgctgtgtgtgacactttgccagggtcccacctggatgctccgacatccatgttcactgggcgtcttgcagtttatctggggtccctgcgtctggattcagtgctgtgtgtgacactttgccagggtccgtcctacctagatgctccgacatccatgttcactgggcgtcttgcagtttatctggggtccctgcgtctggattcagtgctgtgtgtgacactttgccagggtccgtcctacctagatcctccgacatccatgttcactgggcgtcttgcagtttatctggggcccctgcgtctggattcagtgctgtgtgtgacactttgccagggtcccacctggatgctccgacatccatgttcactgggcgtcttgcagtttatctggggcccctgcgtctggattcagtgctgtgtgtgacactttgccagggtcccacctggatgctccgacatccatgttcactgggcgtcttgcagtttatctggggtccctgcgtctggattcagtgctgtgtgtgacactttgccagggtcccacctagatgctccgacatccatgttcactgggcgtcttgcagtttatctggggcccctgcgtctggattcagtgctgtgtgtgacacttcgccagggtcccacctagatgctccgacatccatgttcactgggcgtcttgcagtttatctggggtccctgcgtttggattcagtgctgtgtgtgacactttgccagggtcccacctagatgctccgacatccatgttcactgggcgtcttgcagtttatctggggcccctgcgtctggattcagtgctgtgtgtgacactttgccagggtcccacctagatgctccgacatccatgttcactgggcgtcttgcagtttatctggggtccctgcgtctggattcagtgctgtgtgtgacactttgccagggtcccacctggatgctccgacatccatgttcactgggcgtcttgcagtttatctggggtccctgcgtctggattcagtgctgtgtgtgacactttgccagggtcccacctggatgctccgacatccatgttcactgggcgtcttgcagtttatctggggcccctgcgtctggattcagtgctgtgtgtgacacttcgccagggtcccacctggatgcgtcttgctcatcttgtgacttgcttctctcttttgtgccaccccctggctcctagaggccaagctgaagaaaagtttctatggaattgtcacagaaacattgagattttgcttttacagggtcgatacagagtcgacacaaaaaatcacgatgcgattgatgcagagtggccagtgataatagctaacgttagcctagcgcttgctgtgtgtcctacactgttgcaggcactttgtctgtattaactcccttattcttcacaaagtctatgaagaagatacttatcatctccagtttacaggagagaacagagaggcacaaattaatggagcaaaagattaatgttcatgttcttttttttgagattgagtctcgctctgtcgcccaggctggagtgcaatggcaggatctcggctcactgcaacctccaccttctgggttcaagggattcttttgcctcagcctcctgagtagctgggactacaggcacccagcaccaagcccagctaatttttgtatttttattagagacggggtttcaccatgttggccaggctggcctcaaactcctgacctcgtgatccacctgcctcagcctcccaaagtgctgggatgacaggtgtgagccactgtgcttggcctagcctttcaaagtgctgggatgacaggtgtgagccggggtgcttggcctagcctttcaaagtgctgggatgacaggtgtgagccactgtgcttggcctagcctttcaaagtgctgggatgacaggtgtgagccacatccattagggcccgtcaggaagcagatgccacactcaggctgaggagtgcggggagagctatgacggaaatgtgggcagggtgagggcagggtctgtgtcctagacctggaggcagaggccatgtggtgagggcttctgggcaggagcgtgcacagcccgggtggcccacagtggggagctgggggtaccacatcccagcctcatgcccttgtcttcctctcatctcctgctggggtggaagagaggatggagaagcagggagaggggatccggaggggcccacgccaggaaaccaggctgtgtctaggtgcagctgttcttgccgagtctctcctgtctgcaaagtgagggtgataaacgcctgtcccacgtatgtcctggggctgttgtaaaaatcagctgagaagctggatgctggcgacgtgtgttcacggcgctgttctctgccagagtaagggataattgttgctgttgataaacactcactgggtcctcaccacgaactgagtcttttcacatcctcagttctgctgggagtctctaacctctggaggatgtgtcggcaaaggaaagagaaattgcaacattgcagagcctggattcgaacccagcgtccccatgtaaagtccgtgcagcactgggagagtcacttaatgagcctccgcagtgaaatgcatctcccgggctggtttggggctcccaggggaatgggtgctatgattaccattagctagtggtgtagcgggtgggagaggacctaacaggtgccttcggcccagctgtaaaaggagtgacttctggccgggcgctgtggctcacacctgtcatcccagcactgtgggaggccgaggcgggtggatcacctgaggtcaggagtttgagaccagcctggccaacatggtgaaaccctgtctctactaaaaatacaaaaattagctgggtgtggtggtacacgcctgtaatcctagctactagagaagttgaggcaggagaattgtttgaaccctggaggcggagattgcaatgagccaagatcatgccagtgcactccagcctgggctacagagtgagacctcatctcaaaaaaaaaaaaaaaaatagtgactttgaccgggcacggtggctcacacctgttatcctagcactttgggaggcagagatgggaggattgctcgagactaagagttcaagaccagtccgggcaacatatcaagaccctgtctctacaaaaaaattttaaaaaattagccaggtgtggtggaatgcccctagagtctaagctacttgggaggctgaggtgggaggatcatgtgagcccaggagtttgagcttacagtgagctgtgatcacattctgcactctggcctgggcaaaggaatgagaccttgtcttaaaaaaaaaaaagactggacttgtgggtgacggggatttccaacaaaaccttcccaggataggtgctgggaaggagatgagactcagaaaaaaaaaaaagactggacttgtgggtgacggggatttccgacaaaaccttcccaggataggtgctgggaaggagatgagactcagacaccccagccttgtatccctgagaagggatggtgtccttggaacgggaatccacatagatatttagcaggcagggcggtccagcgacacctgcccgcttccctcagaaggcaccgtctgcagcactcgtacaggtggcggggccagagagcaaggctcgatggagtgacgttgcctccaccgcacgggcgtcccaccttgggagatttccgtatcgctgaagttccctttgtggagcgtggcctctgtgaaaagtgttaataattcacggtagaataggttctcagatgcgccacgtctgtcctcccccacttcttcaacagagaatggcaacacctccattaacctgaatgtgagctcctcgggggtggccctggctgagtcatctgcgccgcctccctccccagagcctcgtacgcgctcggcgtctggctgtcgtgtgaactcagctccacagggcagacatttggtctgtttgctgctccgtcgtacccctggcacctggaacagtgcctgaaccatgagaagtgtttggtgagtgaatgaatgaatgaaaaatgaatgaacggacattcactgggattcagttctccttagagtcagagagacgtaggtgtcaatgctggttgcatgaagctgttacatctttgagcctgtttcctcatctgaatttggggtgtaattcctactgactgtacagttgcagagctgacatttcatgaactttgcttaaataatgtgtgagtgcctggcccataagaggctgtgttagtccttttgtgtgtgtgtgtgtgtgtgtggtttttttttgttattgttttttgtttttgagacagagtcttgctctgtcgcctaggctggagtgcagtggtgtaatctcagctcactgcagcctccacctcctgggttcaagcaattcttgaaccttgtaccagagaggagaggtacagcggccctagaccccagggctctgctcctattggtgtaagtgtttcctcctgcgccctacctccctgtctccaggcagggcctgctgtgggtccctctcctctcagccccaagggacctgttccctccagaaggcacctccccaagcggcggcagcgtcacgtgtgaggcctgcagttcagggccagcatccctcatccctcgccgagatcaggccctggaggggctcccacaggtctgactcaaaggcacaggtccctgggcctccctcctcagcatcgtggacccacgaccaaggacgtggaagggattctgaagattaatggtcgtaagtgtcactggcttttactgagtgcttcctgtgtgtgagtactgcgttcctacttctcctgtgtgtgagtaccgcatacttcccttgtgcgtgagtaccgcattcctacttctcctgtgtgtgagtaccgcatacttcccttgtgcgtgagtactgcattcttacttctcctgtgtgtgagtaccacatacttctcctgtgtgtgagtaccgcatacttcccttgtgcgtgagtaccgcattcctacttctcctgtgtgtgagtaccgcatacttcccttgtgcgtgagtaccgcattcttacttctcccgtgtgtgagtaccgcattcttacttctcctgtgtgtgagtaccgcatacttcccttgtgcgtgagtaccgcattcttacttctcctgtgtgtgagtaccgcatacttcccttgtgcgtgagtaccgcattcttacttctcgtgtgtgagtaccacatacttctcccgtgtgtgagtaccacattcctacttctcccgtgtgtgagtaccgcattcttacttctcctgtatgtgagtaccgcattcttctcttgtgtatgagtactgcattcctacttctcttggactcctgagagttccatgactaagacagtagtttaatatagttggtttcctttgtcatcctgcatagtttagttttacgcatttcaaaacattcttcagagaaaggtcccttggcttcaccaggctgctgtgggtccaaggcacgaaagcatgaagagtctctgctcatcgccagaggactgtgagtcccaaacaggctccctgtagtctgaacaggcttcagccttctctgggtaatcctaggctgtggttacaacggtggctttggctgcactgggaggcaggagatctgggtttttattctacctccgccactcccatgccagccctctgtgtcctcagctgtgaaatgtaagggttggactagccctacgcacttttgattccttttttttttttaagacagagtcttgctctgtcacccaggctggagtgcagtggcacggtcttggctcattgcaacttccaactcccaggttcaagcaattctcctacctcagcctcccgagtagctgggactacaggtgcccaccatcacgcctggctaatttttgtatttttagtacagacaaggtttcatcatgttggccaagctggtcttgaactcctgacctcaggcgatctgcctgtctcggcctcccaaagtgctgggattacaggtgtgagccaccgcacccagccattttctgtgttatatgtgaaatgtagcaatatgcaaaacagcacatacaatgtctgggtttggtttactaaagactaacgagacggctgggcgcggtggttcacgcctgtaatcccagcagtctgggaggccgaggcagctggattgcctgagtccaggagtttgagaccagcctgggcaacatggcgaaactccatctctactttaaaaaaaataaataaatacaaatttaaaaaaagaataaaaagaagaagaattacattgtaagcatgttcctgtgagctgcccttttctggttaaatttatgtttttaggttcatcttcgctcctgcctgtagctctaaactgtgcaccgtcaaagctgcctggaattccattgcaggaataaatggcggcttactcaggggtggtcacgctccttccacctgttggaagagaatccatagtggaaaatcatttcatgctgcaacgcgacacacatacgtacatctgcacacacacatatacccatgcacgcttgaaatgagcctcataaagtaatacctgcccttattaggcgagataatccttttcaatccattctagaaggtgacctaccaaactgcacgatcccttcctaggctgacctgcagcatgaatgatacggggctgagtgcaccccatcgtgggtctgcctgggtgcgcctgaggttctgtgcctggcaggcaggctcaggtcatggtcctgctgatcccaccaggctgtccgcacgcattggcgtgagagcggtgtgcctgccggttcctttccttcatctgccgggattgttggcttccccctgttccgctgggcgtgttccagcagcggctcttcccttgtagttgctgcttctcagggcctgtggcctgagggaccagccccctaggcatgttagaactgtgtgcactgaggtcgggcgcggtggctcacgcctgtaatcccagcactttgggaggccgaggcaggcagatcacatgaggtcaggagttcgagaccagcctggccaacatggtgagaccctgtctctattaaaaatataaaaattagccgggcgtggtggcgcacacctgtaatcccagctatttgggaggctgaggcaggagaattacttgaacccgggaggtggaggttgcagtgagctaaggttgcacctttgcactccagcctgggcgacagagtgagacttcatctcaaaaaaaaaaaaaaaaaagtaatgtgcgctgtagcacgactgacttagtagcaagagagggtagtgtctgagaccagactgcccgggttccaagctttgccactcagcagctgtgtgaccttgggccagtcatctgacctctctgagcttcggtttcctcatccgtaaaattgagataatattagtgcctgcctcctggcgcggtgtgaggctgcggtgagttaacttatcgtatgtgtgtgtggactgttgttattactgagcctgcctgtgcgtcagagcctgacattgatctaattctttgctggtatccctggacacagtggctgtgttgaaatgagctcaaaaccctcggctaaaaggaggttggaggtggacggaagagccacttctcaggctgcctgtattcagatcccagcctcaccattaagtaactacgtgactatgagcaagttagtccatctccctgtgcctcagtttactcctctatgaaatggggataatagtggaactcactattcaccaagtaattgttaagaggattacataagataatgcacataaagctttttttttttctttttgagacagagtctctctctgtcacccaggctggagtgcagtggcacgatctccactcactgcaacctccgcctcccgggttcaggtgattctcctgcctcaacctcccaagtagctgggattgtaggtgtgcgccaccacgtctggctaatttttgtatttttagtagagacgagttttcaccacgttggccaggctggtcttgaactcctggcgtcaggtgatccttccacctcggcctcccgaagtgctggcattgcaggcgtgagccaccacagcatttagctctgccgtctacccggctacccagccaggaactcaggagaggccttttttttttcttcacatgaaaagaggtttattttctcactggacactgtcgcccatgtgaagggagcagccacctggccccaggttccctctcaacaaaggctcagtcctcagaatggctcctcatgagccccctgcagccggaggcctaggctcttccccacagcatgtgccccttagatacccgtctgccctctggtgtaggctggtgggcatgggtgtctgaatttgggtccccacagcacccccattgaggatcacagtgttggagttgaacctggggccacctgggtaccaggacactgtgctccacggtgagcacctctcctgtccctcgatggccagcaggatctggtcacccacctacctgccaccctatcctttttttttttttttttttttttgagacggaatttcgctcttttgcccaggctggagtgcaatggcgcaatctcggctcactgcaacctccgcctcctggattttcctgcctcagcctcccgagtagctgggattacaggcacctgccaccacgcctggctaatttttgtagttttagtagagacagggttttactatgttggttaggctggtctcaaactcctgaccttgtgatctgcccgcctcggcctcccaaagtgctgggattgcaggtgtgagccactgcggccggcctagatgtctttttatcgttgagttgtaagatttttaaaatatagtctagatatgttttcttcccctctgcacattgtcttttcactttcttgatggggtcctttgaagcaaagaactgttcattgatgacgtgcggttcccccgtgctctctgttgcttgtgcttctggtgtcgtatgtaagaatcctttgccaagtccaagaccatgaagatctacccccaggttttcttctacatgttgtttagctttagctgttacatttaggtctttgatccatttagagttattttttgaatatggtagaaagtaaaagttcaacttttacatgtggcaatctggttgtcccagcaccatttggtgaaaagattcttctttccccatgaagggtcttggtgcccttgttgacaatccgtcgaccatagatatgtgggttcctttctggactcactcaacgtgactccgtggatctgtgtgtctggaaagatgcccccagcctgacagtttaccttctttgcccatctgctccagtcatcctggaggctcccatagtacacattgctgggacatcccagagctgaacaccatctctcaagtggcctcagagctaatcacttcccacaggcatcgaggcgaccacagagagggcccagtgtgactggctggcccccagggcgcccgggaagggatctgcagatccctcctcctggcacagcgtcctggcaggaggcatggtcccagagcaggccctgtttgtgctgaggccccgccaggattgggtggatgccttggtgagggccaggtaggagggaacaaatgcagggtgggaagtggctgctggaatggggaagggagcggggcctgcaggagggaagcattcttggcactagtggcatcgtcaccaggacaccggccttgggagggcgagcactacatccatgggtaggcgccggagccctgaggacacggcattgccaagctcttgtcctgtggcttccttccctgtgtccgcagtgtgtggggggtgggcgggcaggcaggacgaggtgacccccatcctttctgtgtgctcgttccatgaaattgggggatgtggatgcttgaacgggctctcagctagtgtgccttccgtgcagaggaggtaacactccccagggcagccagacacccttgtggagtgggatggaaagctgggaggaaggggctggccggcaccatggagatattttggtttgcaggaggattctgggctttatgagcactttaatgcaaccagggcaggcagcaccacgggacgggaactgtaagctgcacctgttgaattctgaaggtccgggctgcccgtgggccccgggaagtgggggtgcccagcttgtggggtgcaggcggggaggggaccgtgtggtggtggagacgccatggtacagcctgtctcccgatcccccaggtcccctgaggccttagagatgaatctcccagaagtggcagccgcggcagggacaccaggatcatgaaggacctgggaggtgaacccgctgctcagttcctggccctcgccccttagacccagtcctcggagcagaactgggggaagctgagatttctgtgggctgcgtgcccacctcctccctcttcgttggtcctcccacgcgcccgcccccgagtgggagcagagccatgtgagctgagttggagctgctcgctgccgagaattgcatcagccccgcctggcaggctggagcgggagcctgttgctatggtgaccaccaggcttcaaaccagtgagaaggatgagatggttgccgggcgaggttttctcaccatgtgatgcgtgtgacaggctgacaggttcggtagacctggacccagccctcccgcaggtgtgcctggatccccagccctcccgcaggtgtgcctggacccccagccctcccgcaggtgtgcctggacccccagccctcccgcaggtgtgcctgggtccccagccctcccgcaggtgtgcctggacccccagccctcccgcaggtgtgcctggacccccagccctcccgtaggtgtgcctggacccccagccctcccgcaggtgtgcctggacccccagccctcccgcaggtgtgcctggacccccagccctccccgcaggtgtgcctggacccccagccctcccgtaggtgtgcctggacccccagccctcccgcaggtgtgcctggatccccagccctccccgcaggtgtgcctggacccccagccctcccgtaggtgtgcctggacccccagccctcccgcaggtgtgcctggatccctagccctcccgcaggtgtgcctggacccccagccctcccgcaggtgtgcctggacccccagccctcccgtaggtgtgcctggacccccagccctcccgcaggtgtgcctggatccctagccctcccgcaggtgtgcctggacccccagccctcccgcaggtgtgcctggacccccagccctcccgtaggtgtgcctggacccccagccctcccgcaggtgtgccatctgctggggggcatgatgggcactgtcccaaaagccatctgggcattggccaggctggggggtatgactgagggacacagggggccacaccaggcccatgtagtgtcagggggccttccttggtccttctgcctagttatgggggaaggggtatggtggggatttgaccaagtgcacctgatgatggggcaagaaaggggtccagactggtccccatctcccagaacagagggcggctctggatcacagctgattaaacctgcccaggctgtgtcaaaaattttttttttaacggagtttcactcttgttgctcaggctggagtgcaatggtgcaatctcggctcattggttcaggcgattctcctgcctcagcccaagtagctgggactacaggcgtgcaccaccatgcctggctaattttgtattgtctgtagagacaggtttcactgtgttggccaggctggtctcaaactcctgacctcatgtgatccacccacctcggcctcccaaagtgctgggattacaggcatgacccaccgcgcccggcctgtgtcagaattttttttgttaaccacgtgacaaagctcatcatcttgctaaagataacagagcgcttggccaagccagtgcaatgcctgggttcagatctcctctctcatcttttgcctacaacgggaaaggaggtaaaaagtctgtgttccaggtgtgctgagcacttgttgtgtgccgggagttgtagtagacactgtcctgtctttttttttttttgagacagagtttcactcttgttctccaggctggagtgcagtggcgcgatctcggctcactgtaacttccacctcctggactcaagtgattcttctgcttcagcctcccgagtagctgagattacaggcacgcaccaccacgcccggctaattttttgtatttttagtagagatggggtttccccatgttgaccaggctggtctcaaactcctgacctcaggtgatccacccacctcagcctcccaaagtgctgggattacaggcatcagccaccagcccagcctgtcctgtctttttttttttttttttgagacagagtctcgctctgtagcccaggctggagcgcagtggcgcgatctcggctcactgcaagctctaggttcacgccattctcctgcctcagcctcccgagtagatgggactacaggcacctgccaccacacctagctaacttttttgtatttttagtagagacggggtttccccgtgttaaccaggatggtctcgatttcctgacctcgtgatccacctgctttggcctcccaaagtgctgggactacaggtgctcaccaccacgcctggctaacttttttgtatttttagtagaggcggggtttccccgtgttagccaggatggtctcgatctcctgacctcgtgatccacctgcttcggcctctcaaagtgctgggactacaggcgctcatcaccacgcccggctaacttttttgtatttttagtagagacggagtttcctcgtgttagccgggatggatgtcctgtctttctattgtatcctctccctcacttggggaggaggcagtgatgttcctgttttgcagaagagccggatcgggcagccagagagttgaagtgacctgcccaaaaagggttcaacctaaatccttgggcttcctgtccagggctctgtaggatgtcagccatccccagaatcaggcattctcaggatgtcctgtgaagaaacacacttctccatcccctgctggaaaaaccatgacaatctctccgcagggaagaacgcggctttgaggtggggagtggctgaccgaggccctttgtggtttctaaatggcagaatgagagaggtgggggcgttgagggtgtcacgcccaggaagcagttggggagggcagggctggacactgaccaagcctagcctgggtgcaggaactgagcttgggatttttgcttggggccctctagggattaggatgaattgtcagatgagttctcagcagacagggctttagggaactggtccagggaaataagacgtagagccagaggggaaccagggcctctgtgagagcctggcagtcatgagatctgacttgctgagcttctgaggtgtggtaataggaactaatcctctcttcggtgtgctttagatgtttactcgtttcatcctcacagaaaccctgtgaacttgggtgctactgttactccatgttgaaggtaaaacagaggcacagagaggttatgtgacttgcccaaggtcacacagctggtaaggggtggagcctgtgattcagacccagtcagtctggctgcagagcatgagctctgaatcaaatgttctcctgcctccattcttaccttttagaaagatgacagcaagttgcatacgtgacctcctcacccccaggagtgtgtgtgtgcacatgtgtatatatatgcacacatacgcgcaccagtagctcagcaagggagggaggctcaggaatgggctcgtgggcctctgtgtgttgatggctgggtttgcagaacctagggagtccggcgtctgtgtgcgtgatgctcctcccttcgtccctccctgctcgcgtggttcccagtgggtggggtgccctgttgcctctggtttagagccgtgcaggatgttaccacagaccgtgtaccaggagtgttcacccaaacttgtgaagggccctggactcccaggaaggagctcagatctaggactgggagtggacggcggccgccggaggagtgagagggggcagtgcgcttgccatgcccggggcccgtcctcctgggcctctctcggcgcttgggcaacctgtgtattgcccacacgtgtgccgctgcttgcagctcctggccaccaccctcctctttgtgtctggacgaatctgactgctctgagcacctcttcagagtggaatcatacaggacagtgtctaccgcaactcccagcacacagcaagtgctcagcacacccggaacacagacttcttacctcctttcccattgtgggcaaaagatgagagaggagatctgagtgcagacatcgcgctggcttggccaagtgctctgttatctttagcaagatgaagagctttgtcaggtgggtaacaaaaaaaattctgacacaggccgggcgcggtggctcacgtctgtaatctcagcgctttgagaagtgtgtcagcccttgagaagacaccgggcaagctggccttcctctcggtgtctctcccaggccgggactatggggagaaatcataacaacagggacaacagcagtgacaacgtcagtgacgacaataacagccactaacgttataccacgtgccaggccctgttcttagaacttcgcctggactaactcattcaactgtcacaaaagctgcatgggatgatgttgttatgttattatcttcatttgacaaatgaggacactaaagcacagagagatgaagcaacttgccccaggacacacagctaaaactgggagtggaattcggagagcctggctcctggcatttggagctgacaggtgcccggcaacccctacctatggccgagctgagctcgtcttgtgccagggagttggcggcaaaacagaaatgagctctgggccgggcacagtgcctcacgcctgtaaccccagcactttgagaggctaaggtgggtagatcacctgaggtcaggagttcgagaccagctggccaacatggtgaaaccccatctctactaaaaatacaaaaattagctgggtgtggtggtgcatgcctgtaatcccacctactcgggaggctgagacaggagaatctcttgaacccgggaggtggaagttgctgagatcacaccaccgcactccagcctgggtgacagagtgagattctgtctcaaaaaaaaaaaaaaaaactaaaaccagaaatgaattctggaggtgggatcttcctttgtaattcagaaggtgactcccaacccctcttcagaagctgggtgggctccaggcctggttcagccccctggcctcctgtcgatacccatgggggggtctctgtccctggtattactcctttcctgtctactttttttttaaatttagattttattctatttttttaaattatggcaaaataggccgggcgctaggtagctcacgcctgtaatcccagcactttgggaggccgaggtgggtggaccacgaggtcaggagatcgagaccatcccggctaacacggtgaaaccccgtctctactaaaaatacaaaaaaatttagccaggcatggtggcaggcacctgtcgtcccagctacttgggaggctgaggcaggagaatggcgtgaacccaggaggcggagcttgcagtgagccgagatggcgccactgcactccagcctgggtgacagagtgagactctgtctcaaaaaaaacaaaaacaaaaacaaaaaacaaaagaaaatcatggcaaaatacacatgcctaaaattttccatccagtgtacgcatcagtggcccgaggcacgttcacactctggtgcggccatcagcaccgtcatctccggaactctcacctggctaaactgagactccgcatctgtgaaaccagcgcaccagggaccggcttcgtggaagacactttttccacggaccggggaagggtggggagcgctttcgggatggaactgcgatccctcgcacgcgcagatcacgacagggctcacgctcctacgagaacctaatgccgctgctgctcggatgggaagtggggttcagggggtgacgcttgctcacccaccactcacctccggctgtgcatcctggttcccaacaggccacggactggtgccggtccatgcccgggggggctggggacccctgtattgaacaacagctccccgtttctccagcccccagctcctggccaccaccctcctactttctgacttgatgaatctaactgctctaagcacctcatccgagtggaatcatgtggtatttgcctttctgtgaccagcttctttcacgtagcctaatgcccccaaggttcatcgatgtcagaattggcctgtgtcggaatataagccgaataatatccgttttatgtaaaggccgcgttttgtgtatccattcatccacccatagacacttgaggtgtttctgttttttggcgagtgtcaataatgctcttaggaatgcgggtatttccccgacaacctttgggcttacttcactcatcagcagcaagcaggccatccttgaagcttaccgtggggtgggcccattgaccagcctggggagagtgggtgggtcattgaccagcctggggccatcatgctggctgggaaggcgtggccctcaggtgccagcttctacccaacactaagccgttggtgctcctggcacttacttacttgctggaagacattccaccttgctttcccgtctttccccagaagagggtgctgggtttctgcttctctcctgaatgggaaaagggcggctgcagcttgccatgaggctggcgtgggtggggttaggagaaaggactgtcaggtgctgtgttgggaagtgtgtgtggagcttccgtgaggctggggttggccttctgagcatacatggaagggctgagtgggagcagggtgttagggtagccggtcatgccgtagaaccaaattaatgctgaaggccgggcgtggtagctcacactaatcccggcactttgggaggctgaggcgggtgggtcacctgaggtcaggagtttgagaccagcctggccaacattgggaaatcccatctctactaaaaatataaaaattagctgagtgtggtagtgggtgactgtaatcccagctactcaggaggctgaggcaggagactcacttgaactcaggaggcagaggttgcagtgagccgagattgtgccactgcactccaggctgggcgacagagtgagactctgtgtcaaaaaaaaaaaaaaacaaccaaaaccccccacaaattactgctgaaatcctcatcacttaacacaagcaagctgctgcttgctcacagtggtcctggtagacggggggctctgctccccgtggtcatgccgggacccagcctgatggagactgcaccatttggaatatgtggcctccaagggtcacagagggaggagaaagggagaaagagctgtgtgtaatttttcactgttcagccgtgaaatgatacttgtcatgtccacttacagtttgttagccaggactgagcacctggccctgcccagggactgccaagtggccagacagtacggccttccatgtgcccagaaagacaggaggatggggatattgctgggcactggtcgtgttgaccacatagtggcaggtggcttatgtgaaggatgaaggcccttgagcctgctctgtggccagggcagtggtgtcatggtggcagtggtggcagtggcggcagtggtgtcatgtggcaatggtggcagtggtggcagtggtggcctggtggcagtggtgtcgtgtggcagtggtggcctggtggcagtggtggcctggtggcagtggtgtcatgtggcagtggtggcagtggtgtcgtgtggcaatggtggcagtagtggcagtggtggcatggtggcagtggtgtcgtgtggcagtggtggcctggtggcagtggtggcatgtggcagtggtggcatgtggcagtggtggcagtggtgtcatgtggcagtggtggcatggtggcaggtgtctgggcactgaagggacttgggtgtaactgacttctaggggaagtggcagaatcatggtcatcttcatgtgccccgcactgtgctgagctgtttacagacgtcatctcatggaatccccacaacaatcctatcattccgtttcacctttggggaagccagagctcaggaccacagcctccaagtgatggctgtgcttgctggtaggagggtgcttatggcagcagagaggccgggggctgaatggagtgtgggggccagaggtggtggggccacaaggatgtgatgtgtgtgtgtgtgtgtgtgtgtgtgtgtgtgtgtgtgtgtgtctccatgtgcctgcgtggatagaaacaagcagagacaagctggctgggcttttgcccttccccagctccgcgcacacctagctttgcaccactctggaggaatggtgacgtcgaatgtccaaggaagaggctaacctgggcacgtcctcttacctgccctccttgaatgacacaagacattggaagtggaagtcacagtcaccggtgctctggagctgggagtggggagaaggaggtgacttttgaggcactctgtgacagcccagttcaacagtagaattatgtttaaggcccaggaaggctctgggtggagagccagcattttgagccgaaggccagtgaacgtggccacccagcagcactgggcagaggtgcggctgcttctgcaggtgtatgtgtgaaggggtgcaagtggacgccttgggcgacttctgcggacaggggcaggagcccggagctgcgtggctctgggattgaagggcaccctggggtggaaggcaggggtcgtgcatcctggtcctggctgctgccaccctgcagggctgctttgagagtcttgctggcctctctggacctggcattacttgtctgttctctgaattgcctcttcctacttctcagcactagattgtcatttaatttttcataaataccctaaggacttacaaagccatagatgggaggggggctccgaggaggccatcccaggcaggtggtgagcaccgttggattgaaaggtcctcccaggtcatcgcctcctggccacccgccttctgcagctctggggctgagtggcatttcccacagggaaagacaggaggaagagcagagccttaaatcaaatcagcccaggattattacttgttatcaattcttgaggaggttcggaggggaagcaggaagtaggctgaagctgttaactctaataagggttagaactcctatgggatttgtcagaaggacttcctggcccccagaccctaaataattgaattggttgttatgggaagagatgaggaggattattaggagatcgtatcactcagccagcagttactgagcattggctctgcgtgagtcctgtcctgggcgccacaaataacaggcagtgagcagaagagggccaccacctcgcggggaagacagaatataccgataacccaaacgaactcagacttgctttctttgtagaggatttattttctttctttttttcctttatttttatttatttattttttttgagacagagtctcactctgtcacccaggctggagtgccgtggcaccatctggcctactgcaacctccacctcctgggttcaagtgattctcctgccacagcctcccgagtagctggaattacaggggcccgccacacacccagctaatttttgtatttttagcagagatagggtttcaccatgttggtctcaaactcctgacctcaggtgatctgcccgccccggcctcccaaagtgctgggattacaggcagaagccactgcacccagccctaatttttgtatttttagtagagacggggcttcaccatgttgaccaggctggtctcgaactcctgacctcaggtgatccacccacctcagcctcccaaagtgctgggattgcaggcgtgagccactgagcctggcccctgcccctttttttttttttgcctgattgactgaacgcgttattgtttgtgaaatgctctttttatctggtatctcttgtcactccacaggggcagccctgtgaactgcgcagggcagctgtgtcttgcccattttacagataaggaagtggcggcacctagagattaggtctggacgcgggacccagatctgcctcctggccccatgcccacctcgttgaatcccgttgcctttccatgggcgactcgtaacggagctgggggtgctggagtctgtgcccgcccctgcatctggtgtgtgatagcttaggagatgtttgttgagtggctgttgcttgcgtacacatgccgtcagctttcgtcgtatcatggcaaggttatacggcccgtctgcaatatgattcctctatgttcggtgggcacataactgtctttcctacagagagatgaggaattttagttccctctgccaaggtggggggattttgtcaaatcgcaggaaacaatggccttggtgcaaagagtagctttaatctgtggctcagctgtttctcagccaggtggccttggatgagactcagaagcctcagttttcccccgtgtcaaagggggccattcatagctactttgacaacctccctgggctgtggggatgaaatgagatcctggccgtgggctcaccgtgtaaaacactgcgcagataatactcagcatgtcccatccatccccaagagctggagactggtgaagccacatgcgcttctctgcccagggctgctggccaccctgacaccctgggcctcagcctctgcccttgatgtccaagaactatgattcctttgtctcaggctgtggagccctgagcttctccaggcggccacttctccaggcggctacggtctctgcctccctcttccaaggatcttggaggtggatgattggatttcatctccatggcaaccagagaggccataacacccgcccatggtggggcctcgagtctgttcccagcagtggaggcagagccggagcaaacaactcctgcaacagcagctgtcccccaggaatgagctgtcccccaggagcgagctgccccccaggagcgagctgccccccaggaatgagctgccccccaggagcgagctgtcccccaggaatgagctgtcccccaggagcgagctgccccccaggagcgagctgtcccccaggaatgagctgtcccccaggaatgagctgccccccaggagcgagctgccctccaggagtgagctgtcccccaggaatgagctgtcccccaggagcgagctgccccccaggagcgagctgtcccccaggagcgagctgtcccccaggaatgagctgccccccaggagcgagctgccccccaggagcgagctgtcccccaggaatgagctgtcccccaggagcgagctgccccccaggagcgagctgtcccccaggaatgagctgtcccccaggagcgagctgccccccaggagcgagctgtcccccaggaatgagctgtcccccaggagcgagctgccccccaggagcgagctgtcccccaggaatgagctgtcccccaggagcgagctgccccccaggagcgagctgccccccaggaatgagctgtcccccaggagcgagctgtccccaggaatgagctgtcccccaggagcgagctgtcccccaggagtgagcttcctcccaggagtgagctgccccacagcctctgcccggcctccagttgccgctttgctgggctaatgaggggctccaggcctcggggtgagggtggcgctgtctgtgctcccagtggctgctacaggccaggtcgagggtcctgagtgaatgagacaggggccgacccccacccacccctgcctgtctgtggttcacaatcagagcaaagccctttccgtccgtcttgtcttctcttccccagcgaatcccacagtccccaagactgaggacaagccctgcctcttccgggcagccttccctgtgctggctgaattgatcacgcgcctggctgatggcttcataggctgcttcagagtattttttttttttttttgagatggagtttcgctcttatcgcccaggctggagtgcaatggtgtgatctcagctcactgcaacatccgcctcccgggttcaagcgattctcctgcctcagccccccgagtagctgggattacagacatctgtcaccatacccggctaatttttatatttttagtagagacggggtttctctatgttggccaggctggtctcgaactctcgacttcaggtgatccgcctgcctcggcctcccaaagtgctgggatgacaggcgtgagccactgtgcccagcaagagtcttagttccatttggttgtaaagacgctcacttcagtgtccctgtctgaacctggcggctcttggccttcctatacattagagtcacctggggagcttttaacaggcctgatgcccaggccattccataccaattcagtagcaatccctggggtaggagccagagagcttcccaactccccagggattccagtgtgcagtgaagattggaacagttatcttaggattcaagtcatgaactggccgggcgcagtggctcacacctgtaatcccagcactttgggaggccgaggcaggtggatcacctgaggtcaggagtttgagaccatcctggctaacatggtgaaaccctacctctactaaaaatacaaaattatccgggcgtggtggcgggcacctgtaatcccagctactcaggagactgaggcaggagaattgcttgaaccggggaggtggaggttgcagtgagccaagattgtgccattgtactctagcgtgggagacagagcaagactctgtctccaaaaaaaaaaagaatttaagtcgtaactagtccaccagcctgtgctgaatggaggctgactgatgaacagcagagttagctgacaaagcttgctgtagtcttaactcactgcaaattgccaaagccctggtttgttttttaagggctgggaggtccctaagggttcttggtactcaggaaggagagcaggggaataatgataatagctgccgttttgttagcgccagctttgggtgccttgcatagcatatatttcctcattgtaacctcgcaaaagcttcatgaggtatagatcttgtttttatcctcattttagagatgagaaaactgaggctctgaatggctaagtagcttgcccaaggtcacatggctaaggtcacattcccgaagtgctaatctcaggaatggaacccgagtgtgattccaaagcctctgcccttgaccactgagctgtcctggctccccaacctctgctccatcaatcaaagaatggggggccctgagaaggaggtggcttgtcccgtgggaaagatgctggtttccaggattcctccccttggagccaggccctgactgaggggctcccgatggtattaaatatctcctggatcagctggggtcacctggaccctgaaggtgtctactttcccgttgcctacgacacccactcggcttcagctgagctttcccaaggacccttctgccctgatactgtgcccagttctttaacctacatcatgttatttaatgtcattttcacaaccaccctgtgacatggtatcgttatcctcatcttgtttctttgagacagtctcactctgtcacccaggctggagtgctgtggtgcgatctcagctcactgcaacctctgcctcccagtgcaatagaagactggccgggcgcggtggctcacacttgtcatctcagcactttgggaagccgaggtgggcggatcacttgaggtcaggagttcgagaccagcctggccaacatggtgaaaccccatctctactaaaaatacaaaaattagccgggcatggtggcgggtgcctgtgatcccagctacttgggaggctgagacaggagaattgcttgaacctgggaggcggaggttgcagtgagctgagatcccaccactgcactccagcctgggtgacagattgagacttcgtctccaaaaataaataaatcaataaaataaagtgcagtagaagacagtgtccttattgttgtaggtgaggtggtagattttgtatctgagccaccatccctgctgaaattgccccggacaggctgatctggtacaggtggcacctgggaagtggcagcctcgcttccgctggccagttccctggttcagggttgccggcctcccagatccacacctgtggtccagactctgctgtctggctgcccgttggatcttctgacagggatggccatgagtcttctcagtccagacatgtctccacctggacttagggtctgttcccccggaaccagctcccccttcctgtccatcgctcagccctccaagcccagaggaccctgctgtggccgcattttcagtcaactctcccatcgccagactttgcccttggttcccaccatggtcacctttgacaaagcacggaggggcggtttgccccgttccacatcatctcatgcaccacagtcagcttcgttttcctgaagtcacctctgaaatcaccttgccattttggcatccgtggctcccagcgtgcgtgaaatctgactattcaggatagtgttccaggccctctgcagtctgacccctccagagctcggcttcagtggtaccagtctgttcatcagggccaacctcctgcgtcctgcccccattctgcacgctgataccctgccgcaaatggaccttttccttcctcacgctctgtgactggttgtttcttccatatgaacccctcagggcagcccacgcacttcgtgtttggtatttgtatgagtcctacatatgataacattttaagagcaaaggttgtggagttggatgacctgtgtccatctggtttcccacctgactgccgtgaaatcttgggcaagtaacttaactccctgcgctttcatttcctccattgtaaatgagtcataatggtacggaggcagaaatttaaaaacaaatatgtatgtatttactccaagaaaagtaacaggcaaggcaagggttaaaaagaaaaaaaaaaacaggccgggcacggtggctcacgcctgtaatcccagcattttgggaggccgaggcgggtggatcacgaggtcaggagatggagaccatcttggctaacacggtgaaaccctgtctctactaaaaatacaaaaaaattagccgggcatgatggcaggcacctgtagtcccagctactcgggaggctgaggcaggagaatggcttgaacccgggaggcggagcttgcagtgagccgagatggcgccactgcactccagcctgggcgacagagcgagactccatctcaaaaaacaaaaaacaaaggaacaaaaaaaacctctttttttttctgcctagcaagctcactttaaggagttataagataacgctgtttaagaagccaaggctaaagaaatgggctccacacacccgccttttagagcaaggttgaaggaaaaaagaaagagaaattcctttactgttactcctttccctggcttcctaagcataactgtgtttacaaatgtctggatttagccagtccttgtttttcttttgacacagctacaagccacaagttatgcactatatgattaactgcttttgttttacttttgtgaagtctgcttataaaaaccccattctgtctttattcaatgctaagctttttaaatgcaaatccactgagctagtgcatacctaaaataaacagtccttcccttctccatatcggtctctccggtcctcagtttcctgcaacagtacaacttagattttaaatttttaagaagtttttcaggcagagtgtggtggctcatgcctataatcccagcactttgggaggccaaagtggaggactctttgaggccaggagttcaagaccagcccggcccacatagcaagaccctgtgtctacaaaaactttttcgaatcagccaggcatggttgtgcatgcctgtggtctcagctacttgggaggctgaggcagggggatcatctgagcccaggagtttgaggctgcaatgagctatgtttgtgccactgcactccagcctgggcaacagagcgagactctgtctctaaaaaaaacaaaaaacaaaaatcaaaaaacaaaaaaaagcttttcaagtgcaccagtcttaagcatagagcttggtgaatatttccatatgtctgcttgtgtaactaacacccagatcaagatatggaacatcttcagtgtcctggaaagttgcttcctgccccttcccagccaacactccctgtccccgtcgtccacccccagaaagccactgccatggacttctatcaccatccatttgtttcgcctgttcttgagctttgtatttaggctggtgcaaaagtagttgagagctggacgtggtgggtcacacctgtaatcccagcactttgggaggctgaggcgggtggatcacctgaggtcaggagcttgagaccaacctggccaacatgctgaaaccccatctctactaaaaaaaaaaaaaaattagccgggtgttggtggtgggcacctgtaatcccagctactcaggaggctgaggcaggagaattgcttgaacccaggaggcggaggttgcagtgagccgaaattgtgccactgctctccagcctgggtgacagagtgagaccccgtctcaaaaaaaaaaaaaaagtaattgtggtttttaccattatatattacctttgctccaacctaaagtaaatagcctcctgcggtgcaggcatacctcgctttacggcactcctgtgatgcgggcgtaccttgctttacggcactcatgtgcaggcgtacctcgctttacggcacctccatgcttagttgagcttcaaagatgctgcgttttttttcaccagttggaagtgtgtggccacctcgcattctctctgtgttacgtgttggtggttctcacgatctttcagacttttttattgttatgacacctgttacagtgatctgtgatcagcgatcctccatgttagcattgtcattgttttgggcaccacagaccggacccggcaaccttcatctatgaacgttgtgtgttctggctgttccgcccaccagcctttcccagcctctctcttctccccgctccagcctccctattccgagacacaaaaatatccaagttagtccagtgagtaaccctacagtggcctcgaggtgtgcgtctgtcactttaaatcaaaagctagaaatggttcagtttagcccgggctcggtggctcacgcctgtaatcccagcactttgggaggccgaggcgggcagatcacgaggtcaggagttcaagaccagcctggccaacatggtgaaaccccatcgctactaaaaatagagaaattagccgggcgtggtggcgggcgcctgtaattccagctactcaggagtctgaggtgggagactcacttgaacctgggaggcagaggttgcagtgagctgagattgtgccgctgcactccagcctgggtgatagagactgtctagaaaagaaagaaagagggagagagagaaggaagagagagagagagagagaaaaaaaaaaagaaatgatttagtgtagtgaggaaggcttgttgaaagccaagataggctggaagcggagcctctcctaccagttagccaaattgtgaacacacaggaaaagtgttttaaggaaattcaaagtgcttctccagtgaacacaagaatgataagggaaacagccccactgctgatatggagaaagtttgagtggtcggataaagatcaaaccagccacaacgttcccctgagccggagcccaatccagagcaaggccctcgcactctgcaagtctgtgaaggctgagagaggtgaggaagctgcagaggaaagtttgaagctggcagagatttgttcatgaggggtcaggaaagaagccgctttcataacagaaaaaggcaaagtgaagcagcaagtacggatggagaagctgcggccagttgtgcagaagatgtagcaaagactgtaaaggaaggtcaccgcactaaacatcagatttttggccaggcgcggtggctcacgcctgtaatcccagcactgtgggaggccgaggtgggtggatcacttgaggtcaggagttcaagatcagcctggcctacatggtgaaaccctgtctttactaaaaatacaaaaatcagccaggcctggtggtgcacatctgtaatcccagctactcaggaggctgaggcaagagaatcacttgaacctgggaggtggaggcaagagaatcacttgaacctgggaggtggagcttgcagtgagctgagatcgcgccattgcactccagcctgggcaacagagccagaccctatttcaaacaacaacaacaaaacaaaacaaaacaaaaacaaaacagatcagattttcaatgtagacaaaacagccttctattggaagaagacatatgtaggactttcatcctagaaaagggatccgtgcctggcttcgaagcttcagaggacagaaggacaggctgactctagtgttaggggccagtgcaggggtgactttaaaccagtgctcactgaccattctgaatatcccagggactttaggaataatgctcaaacaatggtattcttcacagaaatagaaaaaaaaaaatgctaaaatttatatggaaccaaaacaaaaataacaaaactggaagaatcacattacctgactttatttgtttatttttttgagacagagccttgctctgtcacccaggctggagtgcagtggcccaatcttgcctcacggcaacctccgcctcccgggttcaagcgaatctcctgcctcagccccccgaatagctgggattacaggcacctgccaccaagcccagctgatttttgtatttttagtagagacaggctttcaccatgttgaccaggctggtctcaaactcctgacctccggtgatctgcctgctccagcctcccacagtgctgggattacaggtgtgagacaccgcacctggcctctctgaagacttttgatgcagctttggtggaataatggtcagggctgggctccctcagctgctcttccctctctcattcccatcctcaattcttgggcagaaaataagtttatcacttaacagtcagcctctgtatcacccttgtgacaggctggagggtgtcgctccagcctgggcaacaagagtgaaactctgtctcaaaaaaaaaaaaaaaaagaaaaagaaaaagaataaaaaataaagttagcaatattcagcaatgatgtggccggcaagagcctgcagaggatcatgggccaggtcacccatcctcactgagtcctgcacggctctcggctcagctcacgaggctctcaggagcaagtccctgcctcctctccagcacggccctctccccctctgctcactctgtgttctagccctcctggctatttatagtcccctccaggggccctgctgtttcccactgggtgccactgccaagcctcctctcaccgcctgaaactctgctcctgtcccccacccgcctggcaggcacccacacagctttcaagatccaattaataacattaataatagcagctgagatggattgggtgcttcctatgtgctaagtgccgtatgcgtgtcatccagtttaacccccgcagcggcccgtgcacttgatcctgtgtcgtcccccgtttcacacggatttgctaaacccgtatccatttagtagcagccgccctgtgccaggcactcctcggaggcacagagaggttaggaagtgccagagcgtgggctggaacctccgctgccggaccgcagggtccctgctctcagccacagcgatgaactgtcttccttagcgtggcaccaaagcctccccagccacctcccctccccgagtgttgcccacaccctccggtccgccttgccgggcctttgaggcctctgtcgtagcatctcggagatttgattgctgattggactcgcttcctctctgggctgtgaggatatcatttggaaatgtgttcattgtaagcagcagaaaacccaatatatagggacttgtatttcccatgagcaggaaatgagacaggctcttcctagtgtggctcagctgaacagcatgagggaaatggctctgttcttttatttatttaattaaattaattaattaatttttattttttgagagggagtcttgctctgttgccccggctggagtgcagtgctacaatctcagctcactgcaacctctgcctcctgggttcaagtgatctcctgcctcagcctcctgcgtagctgggattacaggtgtgtgcaaccatacctggctaatttttgtagttttagtacagacggggtttcatcatgttgagcaggctggtctcaaacttctgacctcaggtgatccacctgcctcagcctcccaaagtgctgggattagaggcgtgagtcaccacccggctaatttttgtagtttctgtagagatggggtttcaccatcttgcccaggctggtctcgaactcctgacctcaggtgatctgcccgccttggcctcccaaattgctgggatgacaggcatgagccacgcgcccagcctctgttctttcttgacctgttcgtggtggcagcagtaaagccaccgtaactccagtcatcacccatgagttcaaggcaaaacgtctctttgtaatcatcaaagtcagggccttgccagaggtcccagcatgcttcacttgggtctcagtggccagaatggtgtagggcagccgttcctggtaatgagagaggcagagaaagcgggtatcttgcctgggactggtctgttgccacttcctagaaaacgagggtagagtaagcaaggaagaagggaagacgggtgtcgggtgtctgccagtgccctagagcgcagagaccgtacattaattttttcaaaatttccagaatcggaaggctctaatgattttgtgttgtagccttccagtcttttttctatgcacgtatgtttttacttttttcagacattgtaacatactttaattattgttattaatctctttttgcacttgataagatgctattcatcatccatatagtttttaatgctatatagcagcccatcttgtagaaaaaccataattgactcaaccagtctcataattcaggttgtttttaatatttcacacttacagacagccctgtgacttacaactttatttttatgttcatttataactagtatcatagatcataatcttattacgctgggtataaactgtaccaaccactaaaccttttgataccagttaccagattgactctagaaaagttgggccaacttttttttttttttttcgagacggagttttgctcttgttgccaaggctggagagcaatgttgtgatcttggctcaccgcaacctccacctcccaggttcaagcgattatcctgcctcagccttcccaagtagctgggattataggcatgtgctaccacgcctggctaattttgtattttagtagagatggggtttctccgtgtgggtcagcctggtctcgaactcctgacctcaggtgatccgtccactttggcctcccaaagacctggggttacaggcgtgagccactgtgcccagccaaagttgtgccagttataggcagcctccaagagtttctgtgagtacctatgccctgacagctctggatattgttattattatcttaaaatccttgccaatttgacacgaacagtgaaaactatatagaactttacattttctttcattacaaatgaggttaacattctttttaatgcattttgaatatttgtagttctcttttaaattttctgttcatttcccttacacatttagaaagttgaggttttcatcttttctcattggcttgtaaaagtgctttattggccaggtgtggtggctcacgcctgtaatcccagcactttgggaggccgaggtgggtggatcacgaggtcaggagttggagaccatcccggctaacacggtgaaaccccgtctctactaaaaatacaacaattagccaggcatggtggtgcatgcctataatcccagctattcgggaggctgagacgggagaatcgcttgaacctggcaggtggaggttgcagtgagctgagatcgtgccaatgcattccagcctgggtgacagagcgagactccatctcaaaaaaaaaaaaaaaaaaaagtgctttcggtattcaagtattatcataatatgtagaatacaggaaagttcctgggagagggcacagatgaggcagatttgagggcaaaacaggatttcaccaggtggacaaggggtaaggagaggtatatatatatgtgtatgtgtgtgtgtgcgtgtctttgtgtgtgtgtgtgttcacagagacagagtctccttatgttggccaggctggtctcaaactcctgggctcaagtgatcctcctgccttggaggatgccccacatcatagtgatgggatgacaggcgtgagccaccgcgcccagcaaggagggttttctaggcacgggagcagtgtgtgcaaagaggggggagctgtgtgcgtggcaggcactgcatttggtgtgcaaagaggggggagctgtgcgcgtggcaggcactgcatttggtgtgcaaagggggggagctgtgcgcgtggcaggcactgcatttggtgtgcaaagaggggggagctgtgcgcgtggcaggcactgcatttggtgtgcaaaggggggagctgtgcacgtggcaggcactgcatttggtgtgcaaaggggggagctgtgtgcgtgtcaggcactgcatttggtgtgcaaaggggggagctgtgtgcgtgtcaggcactgcatttggtgtgcaaaggggggagctgtgtgcgtggcaggcactgcatttggtgtgcaaagaggggggagctgtgtgcgtggcaggcactgcatttggtgtgcaaaggggggagctgtgcgcgtggcaggcactgcatttggtgtgcaaagaggggggagctgtgcgcgtggcaggcactgcatttggtgtgcaaaggggcgagctgtgtgcgtggcaggcactgcatttggtgtgcaaaggggagagctgtgtgcgtgtcaggcgctgcatttgtggcttaatgctgccattagagattgccatgaacttgatggcttagaacagcagaaatcgatgctctcgcagtctgaagaccagaagtctgaaatcaaagtcccagcccctccccaggctgccggggcagagttcccacttactcccctctttcagtgtctggtggctccaggcattccttggttggtggcagccccagtccaaaccttgcctctgtcttctcctctgtctgtgttttccccctttctctttccatagggacacagcattggatttaggacccaccggttaatcgacaatgatctcatcttgagacccttcatttattcacatctacaaagaatgttttccaaataaggtcacattcccaggtcccaggaattagaatctggacataccttgtgggggggccactactgaacccaccgcagggagctagaaggagtccgatgtcacagggcaggagaataggaccctggagaggtggagcaggtgcagaccacaaagggccttgagctgaggagcggggctgtgtccctaagtgaatggggggcaacacggtctgatttgtgacccggctgctgtggggagggtgctggaattgtccttgtaagagttggtgagggtggggaggagcggggatgcctcacagtgcaggagatgaggggcgggaatgtggaggcatctagaatggctcccaggttccctacgtgtgtggtctttgggaaaaggctgcgtttgaggctcctaaaggtggagatgcccaggagtctgcagacctgacttcttccgggagcaggaacacaattcgggagaggaaggtgatgcgaggttgatggaagctggcgagtaccagtccctgccaccaccaccattttatcatgaacaattgtaagcacacagaaaagttgaaagaattcacagtgaacacccattcacctgctgtctaacgttcccagtgatgatttttatgcgcttgctttatcacacagctgtccatctttccatccctctgaacatcatcattccatcttggtttttttgttgttggttggttggttgtttcgagacagagtctcactctgtcacccaggctggcgtgcaatggtgcaatctcagctcatcacaacccccacctcccgggttcaagcagttctcctgcctcagcctcccaagttgctgggattacaggcacccgccatcgcacccagctaatttttgtatttttagtagagagggggtttcaccatgttggccaggctgttcttgaactcctaacctcgtgatccacctgcctcggcctcccaaagtgctgggattacaggtgtgagccaccgcgttcagcccatcttattttttatgtatttcggagtaagttgcagagagttgtacacttcactccagcatgtcactcactggagcccaacatttgctgaagtgcatgaatctttttttgttcttgtttttgtttttgtttttttgagacggagtcttgatctgtcgcccagtctggagtgcagtgtcgcgatctcagctcactgcaagccccgcctcctgggtccacaccattcttctgcctcagcctcctaagtagctgggacaacaggcgccaaccaccacgcctggctaatttttttgtatttttagtagagacagggcttcaccatattggccagtatggtcttgatctcctgacctcagatgatccgcccgcctcggcctcccacagtgctgggattacaggcgtgagcccctgtgcctggccctgtcatctaggttttaagccccttgtgcattaggtatttgtcctaatgctctcccttcccttgccctccaccctccaacaggccccagtgtgtgacgttcccctccatgggaacagcaatttttaagggatgggtagagaaagaagatttcaccaaggagcctgagaaggacggtgacagtcagaggaaaagcaccgaagcggggacgtcagggaagatcacctgggtcagttaccttagatttgactgcagataatagaaaaaccaagtaacagaggctcaaattgcatttggcactttttctttcttttatgtaaaaacgtcccgaggtagaccttcctggggtgggctccactgtgccctcagtgacctggactcccagcttgtgaaaacgtcccgaggtagaccttcctggggtgggctccactgtgccctcagtgacctggactcccagctttctgctcagctgtcttcagtggtggcttctatcctcagctcacctcatggttcaggatggctgctggggctccagccatcccatcaactctccaaaccagcaacagaaggaggaacaagggcagtgtggatagtgtacctttcggctaaatcagtctcttccagcagcttcctgcaagttccacacatatccctgtaacatcttgttgtctagaacgtaatcatatggctcacaccatcaggaaaggtgtctttgaactagctgctgggtgcactgccgctccgaatacagtaggatttctgttagtcggcggggaaatggatattggctgccagcagcctttgccttgtctgccttttcttcttttttgagatctggtgcccaagccgctgtctgctcagcatacccacctgtggccgtcggagactgaagcctgtgctcagtaggtccccatcttcctcccccagggttcctgccttctccgaggattggtttccccatcttttctgtaccccttttcctggttggagtctcctgggctctcatggttttgtgggggcagaaatgaaaggggaaggccctggaaatgttcgcaggccgagccctttcgccgcccctgggcctccgcccaccagcaccctgtcctcaggccccctgcgttcagctccatggtcagccccccttaaccaggagggatatggaaggggacttctttggagtgagattcagagggaaagggagggcatttgagacctgggttctgatcctgtgatcttcggcaattgtatgtaaattgggaaaaataagaactgcctccccgcggaacatccaggctggaaggagcaggggatggcagggcccgtggtcctctgctctgatcaggatgaactgtgcatgtggggagactggcagagaccttccctaccgtcccttcccccccgttgatcttggacgatctcccaagtgtgtggggtccattcctgcgacccctgggaattggtcagtgtacaggagagtctgcttggccggctggaatctaaactgtgggcaaagccgcggtccactattgcttattttccctggactccaggcaccaacagggcagcctggagcctcctggagaggaggagggaggagggaggggccggcgggaggctgccttccatcccctcctgtgcttctccagagtgagggggtgtcaccaaacggccaggcccttcacggacccagactcaggccagctgggtgccgctgtgcctcttcctcctccccctggaaggaccagagtcatttcacatcccttcagccacagacacaagtgtcatggtctccagggcactgggccttatgtcctaggtgcgtggcctacacacatctcagtgggagggcatcctgggtcctgcccaggtacgtggcgtacacgcgtctcagtgatggggcatccctgggtcctgcccgggtgtgtggtgtacactcatctcagtgatggggcatccctgggtcctgtggttcttcatacacaaccctgtctagggaaaaaactagtccatgtcccctggcagctgaatggggcattggctcagggacgaggagaggcagccgacagaagcaggtgcagcgagcctaggggaagcgctcggctgccaaaaggccagattgggcagagtgtggccacggccaggcgtcccggtgacctgttgacaccattctccagctgctggttgcctgtgggctggtgtgttgtgacagaggagggaagagctggggcccccgtggagaacttggctggctgggacttggctgaagcctcagacctgagacagacggtgcgatcctctgctcattcattcgctccacgcactttccccgagagcctgccacaggtggggttgtgggtgctggcgtacagtgatgactcagatgctcacctcctgccccaggggctcaaggacaaaggggcaggattcactaaggtgccagggggccaggtgccatggggagggtgacctggaggaaaggatgtctgggcagatggcagggcaggctcagccagcctcccccatcacactgtgcgagatccgaagatgcctggccagggagtcccgcccggaagatacccggggaggtttaacaagcggacgccaccactgggcagtctggtgcgtaggaggctcctgctggccccaaggctgccggcacggtgatcttcgtgtctccaggacgccctgcggtgccagctcccgctggcccgcacgagtgctgaagcttacccctgctctgcgatgagtgtgagaggggtgtccaccccccgctggcggccccagcccaaggaggtccaccacagccctcgggagcaacactgccacgttctccgttgccagtcgtggtgggtcagagctggggagcaaacaggccaaggggcaggggccggtttgtgggagggtccctcctatagccatgctggtggggctggacgcaggggcctttccgaggccgccctcgtaacccttttggaaaatgtgaagccctgagctgctgacctgcacaccccgctcgctgcactggctcagcctcccctcccaaggtgggtgggctccgtgcctgggctctggagcccaagtggtgctggcagccctggggggttaatgcggctcaacttcccggtcgcctttccttccctcctcctttgaaggaagcccacactggggtgatagaaataagcaccggctccgaggagtctgctgtgagcccctgtccctgccaggcctgggcacagcctcctcgcccacgccctgctgccttgggctccgtcctccgtgcggggccttgttctgagggctgagggctcccctcccacactccagaacctgccctggacccctggagggagtgggctcagtacaaatggtacccaaggaggagggccacaggaagtgacatcgaccggccccccccacctccttattccctataaaaagcaaaatggtgactcagagaggagagttggaagcgtcctgcctcttgctcccactgttaatttttacacttggaattaggcagaaggcaaagaaaacagcagcttgaaatacgcggctgacatgctcttcatcgggtagcaacagcagagccgctcctccccgcctcccagcagccccggagcgggcagggcccggtgcctgctggctctcccccgcccctcaccaggcccaggcccccgcacagcccccgcccgggccaggcgtggatggtgcggccggggccatggctgccgggggccgccgccggcgcccactacgctaccagtccctggcagctctggtggaggattctcagtggcctttcttgttccttgtctcagacttcagctacgggacggacgagtacgacggagaggggaatgaggagcagaaggggcccccggagggctcagagaccatgccgtacatcgatgagtcgcccaccatgtccccgcagctcagcgcccgcagccagggcgggggggatggcgtctccccgactccacctgagggactggctcctggggtaggtacaccggcttttctttctgggtttggggaggggtgacgggaaggcctgggcatcgtgggccaggccctgcttgggttggtctcgagagattgggactggagacgtttggacctggccgttcttggtgcctcgtcatctcgtcctggccctggacccctctcaggctcgggcttccctccccacctgctttgccaacgctgccgcccctgtctctccccgtctactagccgtctgctccccaggcctcccagacccctccgtgcctctttcagctttcccctgttagcctgtctcctccagaggacccaggagaggaccaggctctcctcccctctgcacccaggccaggcagtggctgcatgcgtggcccgtgggctccaggtgttcagatgctgctcccgcaaagccagcctgggcctggtgctccctgtgggtgcaatgagctgcccgctccagccctcctctgttcactctggaagggaacaaactctgatggcatccacctctccttgttgacagagacaagagttctgctccagagagaagcattgtagaaggaatattaagtatgtgctctgagacaggccagggatagaaactgtggagggtttgcggtccttgtcattaacgtgttcctggcgacagggactgacgctgtctgagcgcagctcgtgtgtgcgtgtcggagacacatgaacgagcaaaacagaggttctgggggttgtttgcctggagctggtgggggagaagaatccaagccggtcctctgtggggggtgtgtgttgcaggaggcggtgggagtgccccatccttgcttggtcctgctcgtccgggtgtgttttgtagggggtctccgtcctgccttctgacgtccccagaggagcagtcgctgagatgccacgggctgcctcttcttcctccaggggctagtgcccccccaccccagctgaggccgcctgaaccctcccattcttgagaaccccctgctccttccagccccgccggccaccctccaccccccacagagctctcacccctcttcacacaccggggtggctgttatagcctttggcaacaagggccttggcaacgggcttcccacttgggggaagccacattgctgccatggcaacagaggccgaggccgagtttagcggcagtccaggcgtgcacctgtgggaagggctggcggggggcaggtgggaggcaagggggccggcgagggggttggtcagtgtgttgttgacctgccctaagacgggaggcgggttagagacaagcgtctcggacctgcgggggcagggtttttgccctggttctcctggaggcattgggctcagggtacaaatagtaacccaaggaggcagagcaggtgttcagggacctgaacgggggccaaccaggggagagcaacgaggagaagactctcgctcccatctctgccttcagctctcaaaccacagcagggctcagagccccgcccggggggactcagctctcaccccactgtgagcagctgcaggaagatgctgcggaatcccggtgtggggccagggtctttgccgctgcctgtccccgcgccacctccctctttgctccctgtccctgtgccctgtccttgtcgcgtgaccaccatgactggtttccgtgtccgtcgattttccgattcctttggtgctggcaggtgccttctctcgggagacagatcacgggcgtcacgcacagatgcccccgcctggcgctccggggcttcggggcagaacttgacttggtggctgtgcgtcttgcttggtggctcacgagggactcacttggcttgaggaccttgaaatccagagatgctagagtgactgccccctaaagtgcttgtggcccccagggttgatgtttacaccatcgactagaagccacgcaaggcaggagtagggagcacttgtccagcctggggatcgtccgggcaaaggtcccatccgcgcacctgccttccctcctcggggagcgtttctgccctttccgctgggtcaccggccccacctagtggactctgcagggattgctgtttacacggggtgcctggagggagctgacgcctcttcctgagtacttggggatgttttggttaaaaacactattaataaaagaccgaggtttctgcggcttggctgtgcttatttggccaaacaggtcccctcccctaccaggcttcctgctggggccttgggaacaggggggacttctggaccaaatcagacaattgttgtagatattcagatatctggcttctggcaccgccttatcgctgggccttccacgcccaaatatgcagccaacgggaagcccaaggttgagtctttgtgttagtcagtgttctctagagaaacaaaaccaacagggcgtgtgcgttatctgtatctatatctacatacgaagaaaagtattagaaggaattgattcaggtgattatggaggcttagaggtcctaatctctgcagtcaatagctggagacccaggacagccaatattggttccagtccaagtccaaaggcctgagagctaggagagccagggatgtaaattccagctcataagccagtggactcgaggctcaggaagagccagtgtttcagtccgagtctggaggctggaggaggccaacatcccagctcacgctcaggtagtcaggcgagaggagcttcctcttattctgcctttttgttgattcaggtgttcagtggattggatgaggcccacctatactggggaggagtctttttactcagtccaccaatacacatatcaacctcatcccaaatgcctcacaaatatgtccggattaatgtttggacaagtatctggacaccttgtggcctagtcaggttggcctagaaaatgaagtgtcatactattattccttcagccacccaggatggaaagcagataagctttgcgcagatgaaaatctattactctcaggctgggcgcggtggctcacgcctggaatcccagcactctgggagactgaggcagccagattacctgaggtcaggagtttgagactagcctggccaacatggtgaaaccctgtctctactaaaaatacaaaaattagccgggcgtggtggcacatgcctgtaatcccagctactcaggaggctgaggcgggagaatcacttgaacctgggaggtggaagttgcagcgagccgagatcttgccactgcgctccagcctgggtgacaaagcgagactccatctcaagaaaataaaagaaaatctactctttagctgtgagacattgggcaagtgtcctcataccgctgagcctcagtctccttgtctctagatagctctaactcccctgaaaagtagtggggaggaggccccactgtgagcagctctcagaccacagcagggctcagagccctgccttggggactcagctcccatcccactgtgagcagctctcagaccacagcaaggctcagagccctgcctgggggactcagctcccatcccactgtgagcagctctcagaccacagcagggctcagagccctgccttggggactcagctcccatcccactgtgagcagctctcagaccacagcagggctcagagccctgccttggggactcagctcccatcccactgtgagcagctctcagaccacagcagggctcagagccctgcctggggggactcagctcccatcccactgtgagcagctgcaggaagatgctgcggaatttcagcatgaggggaggcctgcagcattaggcctggctcaccaaagtgcacagcccttggccaccagggcccacaagacttttctcgccaggtttagagggctggggagccaacagcattaccactgcaaagaccaagtctgatcaatatctgctgcaccatgaccgaacctgcttttgcaatcaacctcctttctgccacatggggtggccccgggtgaagccgggtctctgcggtgttggcaggacatgctcctctctccccagcacgcccttccacagccttgcactctgcctttgtcttcgtttgtgtccccaagacatggatcccacagaggtattagggtgaaacctgaagccctgccccataaaccctgcccaagtccaggctgagcagggcagcacggcagggccaggcccacagaccacgggtggctccattcagcggagactgcccagtttcactctgagaagaaagggccaggactcatctcagctgacaagtgggggtgtaggttcctaaggcaggaccatggtcttacagaaaacccgcctccccacaggccacagactcctctgtctgcttgcctcttgggaagcttagtaaaaaggggctacaaggcagagagaagaactgggttttgtccccactctaccactgtctcactgtgtggcctgaggggtgtcactcatgactccccaccagagctgcagtttgctcatctgtagtgtgaagacactgagaatttcctccctcctgacctcacagggctcaaacctcacagctgttgtgaggtttctgtgagatggtgtttggcagaatgctttgtcaatgtaaaatcgaaacaggggattagactccagcctgcaggagaacccaaagataagggtggaggcgaattgaaatcctcaccattggccgggtgcggtggctcacgcctgtcatcccagcactttgggaggccgaggtgggtggatcacctgagatcagtagttcaagaccatcctggccagcatggtgaaaccctgtctctactaaaaacatacacaaaaaattagctgggtgtggtggcaggtgcctataatcccagctacttgggagactgaggcaggagaattgctagaacccagtggggacagaggttgcagtgagctgagatcacgccattgcactccagcagccaggggaacagagtgagatgccatctcaaaagaaaaagaaaaaaaggaaaaaaaaatcatcatcattgtccctatcatcctcttcctcctcctccccctcatcacagctgcttagagaggcttgtgctgaacctttcacgtgttggtttcatttaagagccccaacaactctatgaggtaggtgctataaccatctccacattacaggtgcgaaaactggggctcggagaggtgacgtaatttgcctaagattagctgggcgtggtagttcactcccataatcccatctacaaggggaactgaggcagaaggatcgcttgagcccaggagttggaggctgagaggtgctaggatcacgcctgtgaataggcattgtacccctgcctgggtgacagagcaaggctccatctcttaataatagctattaatattattgtttgtccaagaccatgcagccagcggggcagcgtgttattgaaacttgggtttctatgatgccagagcctgcacagcgctgtcaggtcccgctcacacgccctcccttgtgaagctttcacacccaccccgccgctgatcctactgcagtttgggaggtatgcacggtcacttgtggggtgcatccgccctgtaagatcaggaccttaatccctgatcatctgtgtggaccccagtggaagcttcttggcacctaggggttctcaactggtatttgtggaatggaagcaagtagttctgggatgttcagtcaggaggaagggaggagcaaaggaaggctcaggcaataatgctgggaagaactcaggctcagggataaagctgggaagaactcaggctcagggataacgctgggaagaactcaggctcagggataacgctgggaggaactcaggctcagggataacgctgggaggaactcaggctcagggataacgctgggaggaactcaggctcagggataacgctgggaggaactcaggctcagggttaacgctgggaggactcaggctcagggataatgctgggaggaactcaggctcagggataacgctgggaggaactcaggctcagggataacgctgggaggactcaggctcagggataacgctggggagaactcaggctcagggataacgctggggaggactcaggctcagggataacgctgggaggaactcaggctcagggttaacgctggggagaactcaggctcagggataacgctggggaggaactcaggctcagggataacgctgggaggaactcaggctcagggataacgctggggagaactcaggctcagggataacgctgggaggaactcaggctcagggataacgctggggggaactcaggctcagggataacgctggggaggactcaggctcagggataacgctgggaagaactcaggctcagggataacgctgggaggaactcaggctcagcgataacgctggggagaactcaggctcagggataacgctgggaggaactcaggctcagggataacgctggggagaactcaggctcagggataacgctgggaggaactcaggctcagggataacgctgggaggaactcaggctcagggttaacgctgggagggactcaggctcaggcaataacgctgggagggactcaggctcagggataacgctgggaggactcaggctcagggataacgctggggagaactcaggctcagggataacgctgggaggaactcaggctcagggttaacgctggggagaactcaggctcagggataacgctggggaggaactcgggctcagggataacgctgggaggaactcgggctcagggataacgctgggaggaactcgggctcagggataacgctgggaggaactcgggctcagggataacgctgggaggaactcgggctcagggataacgctgggaggaactcgggttcagggataacgctgggaggaactcaggctcagggataacgctggggaggactcaggctcagggataacgctgggaggaactcaggctcagggataacgctgggaggaactcaggctcagggataacgctgggaggaactcaggctcagggataacgctgggaggaactcaggctcagggataacgctggggaggactcaggctcagggataacgctgggaggaactcaggctcagggttaacgctggggagaactcaggctcagggataacgctggggaggaactcaggctcagggataacgctgggaggaactcaggctcagggataaagctggggagaactcaggctcagggataacactgggaggaactcaggctcagggataacgctgggaggaactcaggctcagggataacgctgggaggaactcaggctcagggataacgctgggaagaacttaggctcagggataacgctggggagaactcaggctcagggataacgctgggaggaactcaggctcagggttaacgctgggagaactcaggctcagggataacgctgggaggaactcaggctcagggataacgctgggaggactcaggctcagggataacgctgggaggactcaggctcagggataacgctgggaggactcaggctcagggataacgctgggaggaactcaggctcagggataacgctgggaggaactcaggctcagggataacgctgggaggaactcaggctcagggttaacgctggggagaactcaggctcaggcaataacgctgggaggaactcaggctcagggataacgctgggaggactcaggctcagggataacgctgggaagaactcaggctcagggataacgctgggaggaactcaggctcagggttaacgctgggagggactcaggctcagggataacgctgggagggactcaggctcagggataacgctgggaagaactcaggctcagggataacgcttgggagaactcaggctcagggataacgctgggaggaactcaggctcagggataacgctgggaaggactcaggctcagggataacgctgggaggaactcaggctcagggataacgctgggaggaactcaggctcagcgataacgctgggaggaactcaggctcagggataacgctgggaggaactcaggctcagggataacgctgggaggaactcaggctcagggttaacgctgggaggaactcaggctcagggttaacgctggggagaactcaggctcagggataacgctggggagaactcaggctcagggataaagctgggaaggactcaggctcagggataacgctgggaggaactcaggctcagggataacgctgggaggactcaggctcagggataacgctgggaggaactcaggctcagggataatgctgggaggaactcaggctcagggataacgctgggaaggactcaggctcagggataacgctggggaggaactcaggctcagggataacgctgggaggaactcaggctcagggataacgctgggaggaactcaggctcagggataacgctgggaggaactcaggctcaaggataacgctgggaaggactcaggctcagggataacgctgggaggaactcaggctcagggataacgctgggaagaactcaggctcagggataaagctgggaggactcaggctcagggataaagctgggaggaactcaggctcagggataacgctgggaagaactgcagcctcttcttccctttcttggtctcttcagaaggcttagggcttgggattcgaggttgctggtaggtgcgtgaagaggcggcatggcagccaggaactcctgagatggtgcctgctccactccctcctgactgctctggacctgggctgtgtggttcagggactcctcgagtttcagcctccgccccccagcagccggcccctgcatttctccccttcctggatcttgggtccctgctgcaaagagaaggacacgagctggaccctcccgtgtgccaggtgctgtgctaggagcccaggggctgccctgccacccaagtcctccagccatggggctgccccccgtttagtagatgaagacactgaggctcagggtggctcctgggcttgtcccagttgggaaggaggtaagtcggaagtaggtaggctagtgccttggttgtgaccctgggtcccgtcatcgctggctcccatcctctctagccctcctggattcacacctggctgggatcttgctcacctctgcatactgttaatcttccctgatgaaccacacctggctggcctggctcatcccacagctctcacgccctgtctgggatctccgtcttctggctagctagcagccctagagttggtgccgtaattacccccattctatagatgaggaaacggaggcacagggagactagatgacatgcccaggtcacacagttggcaagaggcagagctggggctcacatcgagagtgcaggggagttttctttctgttttagtttatttgtttcacttataaacagtgttgtgtaccggcttctcctcaacattagctttattttattttatgtaatttatttatttgagatggcgtctccctctgtcacccaggctggagtccagtggcgcaatctcggctcattgcagcctccgcctcctgggttcaagtgattctcctgcctcagcctcccaagtagctgggattacaggccaccacatccggctaattttgtatttttagtagagatggggtttcatcatgttggccaggctggtcttgaactcccaacctcaggtgatccgcccgcctcggcctcccaaagtgctgggattacaggcgtgagccacctcgcccagcctatgtattttatttttttgagacagagtctccttctgtcacccaggctggagtgcagtggtgtgatctcggctcactgcagcttccgcctcccggggttcaagtgattcttctgcctcagcctccctagtagctgggattacaggcacccgccagtacgcctggctaattttttgtatttttagtagagacggggtttcaccacgttggccaggctggtcttgatctcctgacctcaggtgatctgcccgcctcggcctcccaaagtgctgggattacaggcgtgagccactgcatctggccaacattagctttatgtagttgaactatgtatatgattttggagtgacctgtactagaacagagaggaggcagagggaggagcaaggtgatctggaaggtgacgaatccagtcccatctgtggctgcagttagtggctgcaactgccctggcacttgccctttggtgtcagttcccattggctgaagagctactgagcttcatacagtctggaggtggggcttgagtttctgccaggaaagctgggagagccagggagaagccaagaggcgggagaaagtgcttcaagccgaggacctgccgttgttaaaggcctggaagtgagaacgtgccaggccctttgagaggttactgtcaacagtgagatgggtgagtcatcagctggggccccatggctcttgtttgggctggcttggtggcttcctgctgggcatagagtgagcagtgttttagaaagagtcatctgatgtcagcaggagggatgcaggatgcatgtcctgtcacacctgtcctgaaatcctccagcaccttcccttcgcctatggggccccccttccctttgcacagctgtcaaggccttgtgtgacctgacccctggaccccctgcctacctctgtggcctcaggaccaactccgtgctagaattgtgaactctcacgagagagagattttgtcggttttgtaacaaaacttgctcattgcagtctctggtgccgagaactgtgcctggcacacagtaggtgctcagtaaatattagctgaatgaatgcatgaaccagccagactaaactcatgtcattgtgcctcacatagtctctctcctgtctgttccccagccccaccagcatctctaaccactgctttttttttttgagacggagtctctctctgtcacccaggctggagtgcagtggcgcgatctcggctcactgcaacctccgcctcctgggttcaagcgattctcctgcctcagcctcctgagtagctgggactacaggcgtccaccaccacgcctagctaatttttgtatttttagtagagacggggtttcaccgtgttagccaggatggtctcaaactcctgacctcaggtgatccgcctgcctcagcctcccaaagtgctgggattacaggtgtgagccactgcgcccggccataatttttttttttttttttgagacagagtcttgctctgtcgcccagactagagtgcagtggtgtgatctcagctcactgcaaccactgcctcccggattcaaggaattctcttgtgcctcatcctccagagtagctgggattacaggcctgtgccacccctcctggttaatttttgtatttttagtagagacagggttttaccacgtagaccaggctggtcacgaactcctgaactcaagtgatctacctgcctcggcctcccaaagtgcgggattaaaggcgtgagccactgcgcccagcctaattttttttttttttttgagacagggtctttctctgtggcccagtctggaacacagtagcacaaacacagttcattgcagcctcaatatcctgacccaagcaatcctcctgcctcagcctcccaagaagccgggaccacaagagcatgccaccacactcagctaattattttttaaaatttttatagagatgaggtcttgccatgttgcccagctggtctcaaactcctgggcttgagtgatcctcctgcctcggcctcccgaactgttgggatttcaggcgtaagccactgcacccggcctatatgtatagtttattcgtggacacaaataaggaaaaatgtataactaactcttagaggctccctctgtcagagggaaccagaggagactttctctttctttattatgtgtgtctacagagttagaattgttagtgatgtaacaggaaaataaagaagttaaaatagaagtgccacgattgggaacgtagagtgggctctgagggcaccagcgggcacatctgacgcagccaacggggagtcacgggaggctccctggaggaggtgacgtttaaagtcgaatctaaaaataagcagtgggccaggtgccgtgtctcacacctgtaatcccagccctttgggaggccgaggcgggtggatcacctgaggtcaggggttcgagaccagcctggccaacatgatgaaaccccatctctactaaaaatacaaaaattagccgggcctggtggcgggttcctgtaatcccagctacttgggaggctgaggcgaaagaatgggttgaaccgaggaggcggaggttgcagtgagctgagatcatgccactgcactccagcctgggtgacagagcgagactccgtctcaaaaaaaaaaaaaaaaaaaaaaaaaatcgcaataggtgtttccatgttatcccttccagaaaagtggcacctcagctgcagagttctgacactgctcccctccccagtacggccttgcccctcccttgacactgccttgggagtcagtcaccaggtcaatctgtccctgagactgtcagctccgcgagggtaggcacggggttccctgtccatggctgcattccgatgctagcacactgcctggtgcacagcaggcggctaacaaatgcttgctgattgggtcaggcggttaacaactgcttgctgattgggtcaggcgttaacaaatgcttgctgattgggtcaggtggttaacaaatgcttgctgattgggtcaggcgttaacaaatgcttgctgattgggtcaggcgttaacaaatgcttgctgattgggtcagggaaggagggaatggagggtgggtgtgggggaagactgtggggagtcaaccattggagactgagatttagacttgatggtgtcagaaatctcagtggctgcgaaagatttcaaacagtagctaggtgtggtgtgtgcttatgcccctcaccctccatgatgctgttcagcccacttctccaagttcatcttctgtcctctagcaagcagcgcttcttaacctgccttccttcctctcttccttccttccttcctccctccctccctccctcaagacagagtctggctctgttgcccaggctggagtgcagtggtgcgatcatagctcattgcagcctccaactcttgagctcaaacgatcctcccacctcagcctcctgagtacctgagatttcaggtgcgccactgcaaccgggttgctgaagctgcttaaccctttcctttcgggccttctcttctttgcctggaaacccttccctatttccagatgctactcagaagccactgtcctgtgaagctttcactctcaggcagcgttagtgccactgtcctccatccccagggtggctggtaaacgagaacactgcctcgtgtgttcacacgtcctcaccccagacggatcgagagcctgagaacggcaagggccccgtctcccagcctcgtatgtgtgccatgccaggccttttctgggtatgaatgaatgaatgaacagacagatggacagacaagatcaggagccaaagtggggaagtacgtgtggtcgtgtgggtgtaagaggctctaaagcttggtggggtggtggctttggcaaaggaaaagaagaaccgaaggacttggtaaaagggatgtgggggttgagggaaggaagactcgtaagatggcggccgcactaacagaagtggaaacccggaaggggaagctgtttcagaaggaggaagggtcctttggtccagatgtgtggagtggaagggccgtggctgggcttccaagtgaggagacccagtggccggggcaggtgctagacctagagcccagcaagacaccagggctgcagctggcagcgggccaccactggcctggaagggagaagggctgcttctctgggggaagggagcagagggctgaggctgggcccaagcaagtgactccacatttacaggaggcgggagaatgaagggccagcctacaccagagagtggtcggggcagtgcctgcatcaacagggcagctgagggcttggagaaactctagactgcagaggccaaagagtcggagagggaggcctctggctttggaataaaccgtttgggggggcctttgaagcaggctgcttctatggagaacattaggagccaggccgaggcagatggagtgtggagctcaggtccagggctggctcagggcatttgtcagggaaggggagggaagctgtggggactggtgagtcacttcccctccaggggggcaccgagggcctgtgagtggagtctgtgtctgatggaggggcactctcattactcactggaatttccagccaccggggacagggtggagtagagaggccctggatactcagggagtcacttgtgtggggttcagggattttgggaagaagtgggcgtcagtctcaccatgccgtgtagaggtgtggggaacggggacgaggatatcctggcagacttccaagggcacctcatgtcctcttgagtggaggaaggaacacagcaggggcctgtggggttttaggcccttcttcgtgtcacctgcaggtctgactcatgtgggcagcccatgccatgcacttggagcccgccgggcgggagacagaagaacccgtggtaccaggccctgagctggcatacttgtgccctggggaatgccaggcctggtcgttcccaagccctcgccacagcctcacccgcccgcaccaaatgaggaattgtggctgaaagggcccttcagatgcgccctggctatttataacccacccaggcagggacaggggaaaaccaggggctggaaggagatgggtggggtgggggtgtgcctctgttgaaccctggtggcacagttccctgatcaaaggctgttagccctggggcccctcaagggctcaccccgcaatcccctgctctgtatttcagctctgcaacaggatggagcctctctccagggagggcagcttctctgctgccaatggaattgcatgagccccacctagagcccagagcttctgaagaattctggggggagtggggggctgtggcctgaactcgggccacaggtgtggttcatttagacggcaccatgttgttttaaaatgttaattatttgccatcgttttaaaatcaggagcattcctgttaataagccagattttagcttattttgaacagagatcaggcagccatgagcttgcgtttcctccagcagccatcggctggagtgagtggtggtttcaccctgccctacctggctcgcttcaccggctggcctcacccgcaggcctcacccgcaccctcatgggtgccgtttgcaacctttgctccatcgttgggttgtaaaagagcttttcccagggcctcctctggactcctcctcccatggaaggaggtgtatgtgcatctgggaactagggccagggggaccagaatgtggcctcactccctgcacagttgggggttctgcaaccattggagaagccaggggaagctggctgggagtgggcagggccggagatggtgcctgtcctgggttctgtgtgcactccccttgcaggatggctccctgcggtggggtggctgggggggctgcttggaggaggtgggggtgctggtctcagcagtgcctgtgagtaggtgggaggctgctcagaggaggtgggggtcctggtctctgcagcgcctgtgagtaggggggctggtctgtgagtgggggggctgctcagaggaggtgggggtgctggtgtcagtagcgtccgtgagtggggggactgctcggaggaggggggctgcttggaggagggggatcctggtccctgtgagtgggacgcccaccgctcctgtgcaggacagtggtggcgccgcgctcctgcctgggggcaggtcaggcctgtctgttgcaaagcctgactcctccagcggcggcgggacgcggctgtggcttctgggcgggccggggcctcccctccggaagggggctccggcgcatggggactccggggtggctctgggggtcgcccctgctcgccgggctcctggctcggccgcgcgcggggaatgaagatgcgtctgggaagcggcctccccgctccaccccaccccggcccggccgcggcctcctcgctcctcctccgccgcagaagcctccgccagccgcggccccgcaaccccagaggacgggcggctccacctcgcgacgcgcgtttcctgtgtgttcggagcgagcgcgagcccgagccccggagcccgggaagggcgggccctgcggggccgggcgggacacggaggagggcgctgggctgctgtgcggcgggttcgcctccgccacgggccgggcacggcgtcaggggctgcccgggccttgctccccctttcgccgggcgaggacgcgcgaggcggcggcggcggcggcggagcgggctggactaggtccgggatgcagtcccgggtcgggagccccaggccgggcgcgcgggtgtagacctgccccccctcccgcccgcctcctccctcctccctcctcccgccgccgctgcgtggaccccgcttcctgtctgccctccgcgggctccggctgccatggaggaggaagaggaggcgataggcttgctggacaaggttctggaggacgaagatgtgtttctcctggaggagtgcgagctgggaaccccgaccagccccggctcagggtcccccttcctggtggctgtgaaggtgggagcgtgacacgccctgggcgctggggggggccgggccggcgctgccgaaggtgcgcgggagaaatggctgatgcgggcgcagagcgcgcggccgggtggaagccctcggcggagggtcccggccccggcagctgttcccgggggagaggggcgggcctgcctccccgaccggtgtcctcggggcagtggtggccgccccctccaggccagcccagctcagggctccggcggctgtgccaggagtcacctggcgcgcctgtcagcccgagcctcgccgcctccctggagcgggtgggcaggaatcccccgtttccacggcaaccgcaagagaggggccaccctcttcccagccaggagacagggacttggtgtctccgagctgaggcaagagggtgtttgcaaagggcaagagccagaggtcactgagcttccttgaaggaaaagcactgggtcagctgaaggggggagggaacagctggcttggaggctgcagccaggtgggcaggtgcccttcccgaggcgggacaggcagggagcatctgctgggccctggcccacccgctctggggctgacggcgttctctgcagcagtgacccgtcctgtaggagaggttggctcccggtggaactggagggcagtggtggccagaatcccttgaggagcggggcggccccggaaccacgccggctctgtgagtctggcccggcacaccacagcggtcttcctttttctctcctggacacacctctcagagcttccacctcagccttttgctcagctgctctctggttctgtgtcgagaagggaggcccagtgaggatgcgtttcggggagtttgcagactgctaggcgaggctgcctaaccgagtgcccatcggcggggcctagaaggcatgtgcagccagcattgctggggacgggaggctgtccctgaacctctctgggcctccctgcccctcacagaagatggggatcacagtcctgccccacccactctacagtgtggctctgaggaggagccaatggaggtaaaaatagatgcagaaccacgggagatggctgatgtgtgagtatgggtggagcggtggctgcaggcctgggtggggagtggagctgtagggaggctggcagtggctggcaccccaccctgtcttctctgatctggtgctggcgtagggccgtgggggtaagtcacgtctccccgtgggctcagggaggcctctgcacttagggtctgaccagcctccccactaggaacagggtgggaaagtctgctcctgagccaggagtcaggctgggagtagcaatgctgggatgggaggtgtgtggccctcatgggcctcctctgggaagcccccagcacagatgtgggcccactcagaggctgcctcctggacctccccttctgctggaccccggcgtatgcctcagctaagcccgtatttcattctgctcagatgctcagaactctagacatttgcctccgcaattatatcccattctcctggaggaccaggaccatgtcatattcattgctgaacactgcacagtgcttggtgtggggctggtgcctgtgagagtctgcacaatgtgtgaggcccgctggggcccacgaagggtgcaccaggttcccagcctcgctccatctcagaggtgtcctgctgtgtacggcggtggcccacggatgccaagagagcctgagcacgtgtcacacctgaaaacgctgctcctcctgggtccccgtgagcaccgggatggtgtcttcccctctactttgctgccagcatgggggaaggagacctttctcgaatgccggggagttccaggctccctgctccatcctgaacacctctagaattcctccctcctctaccggcattggcctcagagggagaagacaagcaggtggccacagagcggtgggaagaaagctcctggattcattcaacaaacactctcaggttaggtgctcttcagagcaccctgcctggcactgtagagatgacaagaggaacaaggcgtgatcttccctcacaaggcgttcagagcaaggggcaggtacagggagtaggaatagagtacggaagtaggcagggtgggccagatgcggtggcacacgcctgtattcccagcactttgggaggctgaggtgggcggatcacctgaggtcaggagttcgagatcagcctgaccaatatagtgaaaccacatctctactaaaaatacaaaaattagccgggcgtagtggtgggcgtctgtaatcccagctactcaggaggctgaggcaggagaatcgcttgaacctgggaggcagaggttgcagcgagccaagatcatgccactgcattccagcctgggcgacagggtgagactcagtctcaaaaaaaaaaaaaaaaaaaagactgtgagaagagtactgataaaagggcaccaaattcaggggagaagggaccacttctagtggagttggggatggcctggatgcgtgcatgtgtgtgtgtgtgcaggccaagggtcatttctggatgatacactcctgtcctgggctgcagaggttcttggcacacccttccctggcagctagtaggaatccaaggcaattctctttgctattactttactttaggggtacttaccttaagcagcagttgcgttgtgagcatgtgcccaagtgccaggcccataaatcaatcctgtttccagtgtcatttccaagacgcttcatcttcctggggggcagaggtaaagttggctgcagttttctccaaagctatagctggagtttgctgcatatctcagcccagacttacctttgaagagttattgatctgtaaaactggtaatgcaaataaaatactgatagcagcgtcatgttgcatttgtaaaatggcttacacttgccaaaaatgtttcatgccattctatttaaagataggtagggttgtgacgggggcgttgtagaaggtgctattttaaggaacttatttgtcaggaataaaaacccttttgtaatgcagattaaccctttaggtatcattctgtgccatttttttttttcttttgagacagagtctcactctgtcacccaggctggagtgcgatggcacaatcatggctctctgtggcctccacctcccagactcaatcagtcctcccacctcagcctccccctcactacaggcacatgccaccacgttgggctaatttttatatttttgtagagacagggtttcaccatgttgcccatgctagtctgtaactcctgggctcaagcaatctgcccctcttggcctcccaaagtgctgggattacaggagtgagccactgagcccagcccaattctgtgccagtttttaatggatcatctgaaacatctctatttctgtttcacctgcccaggtctcttgtgcctgcacatcatgcctgtatcccccatttggatgtttttctaagtgcgggccccacgtggtgatttgagaaatgatcggtggcacctcgatctatattttgcattttaatggttaagtatatattttaatatatattagaaaaaatatgacctgtacatttttcttacgatttcaaatacgtgtagggtaagactgctttttacaagtcagttcttgggcgcagtggctcatgcctgtaatcccagcactttgggagactgggcgcggtggatcatgaggtcaggagttcaagaccagcctggccaacatggtgaaaccctgtctctactaaaaacacaaaaagtatctgggcgtggtggcgtgcacctgtaatcccaactactcaggaggctgaagcaggagaatcacttgaacccgggagatggaggttgcagtgagccaagatcctgccactgcactccagcctgggtgacacagtgagactctgtctcaaaaaaaaaaaaaaaaaaaaaaagttactgtaaagaacaatattgagtaaagaatagtgcaggtggtggtatgtgagtatggcaaaattttaagggtgggatatgaacaaccaaagtttcaaaacattgcctgtgccctatggtgcctgcctaagacctcagacagcaatagggagcccagaatacggggatccacccttcaggagagaggggccactggaatttggtctttgtcccccagcagttgacccgtcttctctgttctaaattctgccaaggaagcagctgaaagagacttcctcagcgcctagcgctgggagaggagagggtctctcgatgcctctacactgcctcagctgtcctgagactgagatgggccagttgtcctgaggttgatgcttggtgtgggtataagccccaggcacggccacccccacccccaggcccagtggcatctactctgagcagatcctgctgggtactcctggcagccagctgtggcccgtgaactgacttctaccgtctgtgaagcctcagaccctcgctgcatgccctatagccttgagtcgcagccagagagccagccctgcttgttgtcttggaggccagtgctactggagagattgtgtctttgcttggcctggaaccagatgtttggaggctttatttagcctctcaactctgtggaggaccaggcctgagctggccacgccttatctctagacattgttcctaccagagtgacctgacgtctttggtttggcggcttcaagctgccacactgtcagcctagcagattgtgcaggatgctgaggataaacgaacccaccaggactgcatttcacaagttctggctgggaggaagtgaggacaggcagcttcccggtgctggagacaggtaggcagcgtggcagaggctgtgggacctggaactctttagagaactcgctccggagcattctaggcacgtgggcacctctccttcaccttcgtattcccagtgcctggctcccggtgggaatgggtgagtgagtggtgagcctggtttttgatgagacaagagacgccctgcaaagactgaagaaacaatgtgaatttcctcatggctctaaactgggaattgtggagtctgaggaaagctggaaaagatgggagatggaacaggccttcctttggtggtgactgagcaacgggtctcctgttagccaagtgcaccgaggctaatttcccatccgtacgctctccaacgcctttgctccaatctcagccaaaactgcagcgtgaacggggcccagagcaggactcttggggctgactgttgcctcttgagggagggtcttcctgagttgtcttcccatcagaaccagcctttcaagagtggactatgaatggaagtcttgaggggaggatcttgcagaaatgggcgattacagggcttccagggtctatgctcgtgccaggggggatgaagcttgtttgtggctggggctgcaaatccctttcttccccccatcctagtccaaccagctctacagttacagctcacggtgtggcatttgctaaaccctcaggcaaaaccttggttggcagggaacaggagggagtgctagcccccagcacaggggatgagttcccatttgtcaaggctgggaagcagcaggaagacccctgagggtctgacctggaggggctggagctgggggctgttccaggctctgatcttgtcccccggggctacgtgtgctggaggctgtgcaggcctctggcagtcccgactctcggtgcctcaggaagatgataacacctgccaggttttgagactccggtgaattgaaccacaaagatagctaagctcagttcctggaatttgtgaagccgccaataagtaactattgcccttgcctgaagcgtggggtctgtcttgcttttctaatgctgctgaaacaaatcgccacaaacttaagggcttaaaaccacacaaatttattctcttatacagaaatctaaaaaggatctcggcccggctccatggctcacacctgtaatcccagcactttgggaggccgaggcgggcgcatcacctgaggtcaggagtttgagacgagcctggccaacatggtgaaaccccatctctactaaaaatacaaaaattagtgggtgtgatggtggacgcctgtaatcccaggtactcgggaggctgaggcaggagaatcgcttgaacctgggaggcagaggttgcagtgagctgagatcatgccattgcactccagccctgggcgacagagggagactttgtctcaataagtaaatacataaataaatagattaattaaaataaaaaggatctccagggctgcattgcttctggaagctctagggcaagcttttccagcctgcggccatacggcccaggactgctttgaatgtggcccgacacaaatttgtaaactcttaaaacattatatatttttcttttagttcatctgctgtcgttagtgttattgtattttatgtgtggcccaagacagtcgtcttcttccagtgtggctcaggggagccaaaagatcggaagcccctgctctaggggagtgagttcattttattgccatttccagcttccaaaggctctctgcattccttagctcgtggccccatcctctgtcttcaaacctaccagtgtagcatcttccaagcagtccctcaccactaccctgtctccccggccctctcactccccttctgtggccacgatgcctcagggaaagatggcattttaggcagcaggtaaagaacgaaccgaaagctagagacctttgaagatgaggaggctggttctcctgcgtgtgggggagactgagcgatgtcctggctgtgggaaagactggaagggtagggacgggcatccgggccactgcaggtggctcataaaggatatggtgggccccatgtcccagtctagggccgaatctttacttgttttttaaatgtctttccggcagggtgcggtggctcacacctgtaatcccagcactttgggaggccaaggcgggcggatcacgaggtcaggagatcgagaccatcctggctaacacggtgaaatcccggctctactaaaaatacaaaaagttagctgggcgtggtggcgggagcctgtagtcccagctactcgggaggctgaggcaggagaatggcgtgaacccgggaggcggagcttgcagtgagccgagatcgcgccactgcactctagcctgggcgacagagcgagactccgtctctaaaaaaaaaaaaaaaagaaaaaataaatgtctttcccactagagtctaagccacttgagaacaggggccactgtctgtttcccatggtatctatagggcctggtggacattcagtaaatatttattgaatgaataaataaatggacacatagcccagtggaatccccaagtactcgcgttttgcggtattcatactcggtccttggcaagcatcgggcaaggtggcactcttaggagttgaatccagctctggtgtgtgggacaggcaggaggagaggaagagagggaggaaaagtcggttcgagaacccaggtggaaaatagattgagggaagcaaaacgagatgttacaggaggaatatgggtgattgtcttttccttttatatttctgcatgttttgtatattttttataataatatctgacttttatcccctatgaaagtgtcgcttaaaataaaaggaaaggggaaaggggggccgggcgcggtggctcacgcctgtaatcccagcactttgggaggctgaggcggacggatcacctgaggtcaggagttctataccagcctggccaacatggtgaaaccccatctctactaaaaatacaaaaaaaattagtctggcataatggctgggcatggtggctcacacctgtaatcccagcactttgggaggctgaggtgggtggatcacctgaggtcaggagttctatatcagcctggccaacatggtgaaaccccatctctactaaaaatacaaaaattatctgggcatggtggcaggtgcctgtaatcccagctactcgggaggctgaggcaggggaatcactggaacccgggaggcggaggttgcagtgagccgagattgtgccactttacttcagcctaggtgacagagcgagacttcgtctcaaaaaaaaaataaaggtcgggggggaagggcagggaagcagaccgtccacgcagggttttggcctccttgctcatgagctgttggctgtgctttgcgtttgtgcaggtggaagcagggaaaggcctggagatgaggaagctggttctctcggggttcttggccagcgaagagatctacattaaccagctggaagccctgttgctggtgagtacagtccctgctctggggccttccggtccccccgcccgtgttgggtgatgtcatgctctgaagctgcttttggagttggagaggaaaggggaccgtacccgtccctccctgtggacagagtctgcagctggtctgcttctggctgggcatcgggcagcccgggtcattgccagaaagggcctgtgcctctcagctccagctctcaaaaggcaggagaagcacacccggcttagagatggcaaacacacctgtcacccacgaccctggcatagggcatcgtgaacccatcatggtgctctgcctgcctgggcgggggccgagcgccttctccacgctgtgctctgggcagtcattcccaatcaatccagttaagaagtctctgccgtcttgtgtccaagtccttctacctccctgggtgagggaaccgttagtgccatcctgaggccccgtgtcaggaaatatgaggtgggaggctgtgttctttttttttttttttttttttttaagacggagctttgctcttgtcacccaggctggagtgcagtggtgcgatctcggctcactgcaacctctgcctcccgggttcaagtgattctcctgcctcagcctcccgagtggctggaattgcacgtgcacgccaccagtcctggctaatttttgtatttagtagagacaggattttatcatgttggccaggctggtttccaactcctgacctcaggtgatctgcccgccttggcctcccaaagtgctgggattacaggcatgagccactgcgcccggcctgtctgtgttcttttgagaagcggcacagctctgaggcatcaggccaagctcagccctcggtaacatgcctcagttcccctcccagatggaggcatcgttgtgagagtctgattgggaggggaatatgaaaatgttttcggaagataaaagtactacacagatgtgaggtggttttgccttggaagaaagtgctccttagatgtgtctggatgttatgcagagtgatcgtggcgtgtcaatctttcttttgggtattttgcagcctgagacataaggtaattgtcagaaaagggagacgcagaagtgtggatctgtggaagctcattcttaacaagaattctaagatgcacatttaagtacttgccatgacgtgaggtgttgtcacacgtcaaccctgagatgctgtcagtgtcccaggggacttgacatttatgttacccaggaatgactgtgtaaatgtgcaggtgcaggccgggcgccgtggctcagtgcctgtaatcccagcactttgggagccccaggtgggcagatcacttgaggacaggagttcgagaccagcctggccaatgtggtgaaaccttgtctctgctagaaatgcaaaaaaaagccaggcgtggtggtgcatacctgtaatcccagttactcaggaggctgaggcatgagaattgcttgaatctgggggcgaaggtcgtagtgagctgagagtgcgccactgtactccagactggacgacggaagtgaaattcctcaaaaaaaaaggctgggtgcagtggctgacacctgtaatcccagcactttgggaggccgaggtgggtggatcacctgaggtcaggagttcgagaccagcctggccaacatggtgaagccccatctctactaaaaatacaaaaaattagctgggcgtggtggcgggcccctgtaatcccagctactcaggaggctgaggcaggagaatcgcttgaacccgggaggtggaggttgcagtgagccgagtttgcaccattgcactccagccggggcaacaagagtgaaactctgaatgtgcagctgttttgccacacgccaggctgagtacgtcccatctctccaggagtttatctgtgtgtacggagctgttttccaagtgaggggcagtgtggcaggtagctgagggtcctggtctggggccagagctagggcaagacttggccctgccattaagagcaggcgtattgcactgtttctcaaactgtgcctctcagcccatcagtgctttgggttgtgaaatcagtacagtgggttgtgaaaccagtacagtgggttgaaccagcatttttaaaccaatgaaaaaatgtcagcatgcatcatacacgggaaagataagtgagggaactttcggtttgttgtctgtctgtgtgcctgtatatatatgtaattgccgggcccatggtgtcttacacctgttgtgggtttgaaaactgctggctttggccgggcgccgtgtctcaagcctgtaatcccagcactttgggaggctgaggtgggcggatcacaaggtcaggagatccagaccatccttggccaacacggtgaaaccccgtctctactaaaaaagtacaaaaaaaattagccgggcgtggtggcgagcacctgtagtcccagccactcgggaggctgaggcaggagaatggcgtcaacctgggaggcggagcttgcagtgagcagagattgcgccactgcactccagcctgggcgacacagtgagactccatcacaaaaaaaaaaaaaaagaaaagaaaactgctggctttgggcaagccctacataaattccttgagcctccatttctggatctgaagatgagagggatgccattctttctctctctttccatggggttgagaagatcgggagatgctttcgggacctcatacagcgttgagttacttaagacactcaactgttagtggaagaaaggaggacaggcaaagagacaacccgtcagacattcgtgaaacacgtcttccaaaccgtgaattgctgtccaaaaaggaacatagttgtcattactaacagggtgtgtatttgaaaggagttcagacagaggatctagactgcctggccgtactggctccaggctttcagcaggtgaatgagctatcgtgcctcagtttttccatctgcaaactgggtatacaaatagtatgcttttcatggggtcgttgtgaggattaaaggaatttatacacagagttctttttttttttttttttttgagacggagtcttgctctgttgcccaggctggagtgcagtggcacaatctcggctcattataacctccgcctcctgggttcaagccattctcctgtgtcagcttcccaagtagctgagattacaggcacccaccaccacgcccagctaatttttgtatttttagtagagatgagatttcaccatgttggccaggctggtcttgaactcctgacctcaagtgatccgcccgcctcggcctcccaaagtgctgggattacagatgtgagccactgtgtccggcacataaagctcttagaacacagcctgagtgttcgttgacactgttaatttctctattgctgggagaggagacaggttagggcttcgtggtttctgccacaacacacccgttccctgaaggagggagtggcgcctgtccccatcagacacggagcccttagatcccacctgccacccacgagcctcttcctctgggccaagaccaagagcccctccctgctctgcctttctaacagctcatgccccaaaggcagaatctgtggggcaggggcccccttcctgatatgcctggcgcaggttccccccttccccagctgtctcctcccggggcaggttccccccttccccggctctctcctccccgggcaggttccccccttccccagctctctcccggggcaggtttccccccttccccagctgtctcctcctggggcaggttcccccattccccagctctctcctggggcaggtttccccccttccccagctctctcctcccggggcaggttcccccacttcccccagctctctccacccggggcaggttccccccttccccagctctctcctcccggggcaggttcccccccttccccagctctctcctcccggggcgggttccccaccttcccccagctctctcctcctgggcccctgcttggctctttcttgagcagagaccagagggagcaaaggaagaactcgctgggaggccaggtctgtggtaggagggctcaggaagaggagtaggaccctccacagccacagcctcagaagaaaacctcagagtgaaagaatcacacccttcctcctctcctccctgagctgggaacccctgcaccctccccacccctcagctaggaggaagctaaaccttctgctcttcggggtggcctcgcaaaggtgccagcttgaaggagaagaaattcgttccctccatgctcgctttcccactcctgaccccattcccaccgctctgccccagcctgtttgctttcatctgaacacttcctgatatgcaaagggctgggtgtgtgtacctaaaaccatgtgcacacacggggcagacgagcctccacacagaagcctccgtcctggcctctggggtgcttgtgggggtcatcttctggggccctcctgcttcctggtgggctctgattacaggaaaagcctgggagcctgggccgaagtagggggtgaaggaaaaaagatgaagccaactgcattgaaattctggatctccttgacactgggaactgagcttgggaactgtgtcttgctacgctggggccacagggtgaggccactccccagagcccctcccaccgctggccacgactggccctcctggggtggactcctggccacgctgcatcgcaggctctttatctataaaacaggtgaatgaggccttcctccctgggctccagtgacgagtgactcgggtggcatggcagcaagcatgccaggccttctggggcaggaggtggaggaagtgggtacatttctttcccttatttcgaaaggccggtcgctgggggacagagctgacaaacggctatgtgaagtcccactggcaagtgagaaccggcccaggcccgtcttcctgagaagcagctggtatgggagccagggttgaagtcactcacgggtcctctccgagaactcgagtggtgaaatggagagccggggcctgcccttgtccctgcagcaggactggggaggagggggtgcctgagtggtgtgctagcgctttggcagaatggctgtgccgtgccgaagctcagtgtgggtcaccttgcctttcagtccaccctcctgcccctgagcccatacgcaggacttcaccagagacaaataacggcctcgagggtcctggccagccaagggcacacacccagccctgtcccctccccgcgagtgaaatcaggagtaacagccaaggtccccatcgtgtcatgagaaccatctgatgccccaagcgcaggccccgtccttgtgactggctgtgggtgagcgtccatttcttccccttttgcagacggggtgggaagttgaggaggaagcataaccattgtgttttgtcttcgtgtgggtggcagatgagcgcgtcgcggcttctgagaaatcccgtctccttggccttcctgggactgctgaccttcctgcttcccttatttccccctcagtggggactgcgccaaggcggggacaagaattcttgggtatggggattctgtggcgactctgcgggctcctccgtggggtcctgcgttgaggtgaaaaggataaactcttacgacgatgtcaatcctgaagctagttccatgtccctcatggagggtggggagtccccaaagctttcagctcacccacctgggcttggggggacactcttcccttgctcctgcctcccggtgccttctgtttccctgtctggcatgcctctctacgcccccactcctccacctgctcagctctccaaggacctggtatgtgtgcctcctccatgcagccctccaggctactccagcacaaccttggaaccatgtggttggtgcttacagtcagtcgcatcgtccatagtcatttcatctgtgttggcccattttgcccaactggattataaaggtctcagccaggcatggtggctcaacacctgtcatcccagcacttcaagaggccgaggcacgtggatcacttgaagtcaggagtttgagaccagcctgaccaatatggtgaaaccccatatctacaaaaactacaaaaactagctgggcggggtggtggacacctgtaattccagctactcaggaggctgaggcaggagaatcgcttgaacctgggaggcggaggttgcagtgagccgagattgcactattgcactccagcctgggtgacagagtgagactctgtctcaaaaaaaaaaaaaaaaaattgcagtctgggaccatgatcgtgtacgcactgacgggaatgccagtaggtagcgcatggctgtattatcccagtttcacacatgaggctgctggtgacacgaagcccagggatgctgagtgatgtgcgcacagcagagctgcgactcaagcccaccctgcctggcctgcaccaggtggaaccccatgcgcttgcctagcaaggaccagacaccgaggggccgttggttctaggacggcgagggtcagaaggagaggcctgaccggacgcagaggggccgttggttctaggacggtgagggtcagaaggaggggcctgaccggacaccgaggggccattgattctagcacagcgagggtcagaaggagagtcctgactggacactgaggggccgttgtttctagcgcggcgagggtcagaaggagggtcctgctttgtcctgcatggattgttggatctgggctttttagagctcggaggatgaaggagccagaaggcagagcaccatctgggtgtctgagtagatgagacgacttcttccagtgaacatgggttctgtctccatcagagtgaggcgatatatctgagtagatgagacttcatcagaatgaggtgatgtgaggctggagtgaggctgggctgggagtttgccgtggttggctggagctggtggtcgtcgttcagagggagctggcgctggctttggtgttcccttcagtgcagcattttcagcagtggagtcacccattctctgctagaatgcttctcttgtcggaaagctcactacttaatcctatgggggacagctctagtgagcccgaatctgaccccataacttttccccactgttcctgggtctgcagagcaacgtagattaagtctaagcctcgtttttgtttttggagacagagtctggctctgtcacccaggctggagtgcagtggcgcaatcttggctcactgcaacctctgcctcctgagttcaagagattctcctgcctcagcctcctgagtagctgggattacaggtgtgcaccaccacgcccagctaatttttgtagttttagtagagacggggtttcaccatgttggtcagacttgtctcgaactcctggcctcaggtgatctacctgcctcggcctcccaaagtgctaggatgacaggtgtgagccaccgtgaccagccaagtctaagcctctttccacgtggccttcaggtaggtgaagaacatcaacagaatccgacatggctggccgggcgcggtggctcacgcccgtaatcccagcactttgggaggccgaggtgggtggatcacgaggtcaggagatcaagaccatcctggctaacacagtgaaaccccgtctctactaaaaatacaaaaaaaattagccaggcgtggtggcgggcgcctgtagtccctgttacttgggaggctgaggcaggagaatggcgtgaacccgggaggcggagccgagatcgcaccactgcactccagcctgggcgacagagcgagactccgtctccaaaaaaaaaagaattcgacgtggctgctctccctctggccaccctgcccttccctgccacaccttccctgtatggcaggttatcaggccctgtgtcctgcagggcctttgcagtacagcctggtcatctttggtttttttttttctgattattcatattcattcattgtaggtgatttataaaatgcagagaaccacactgaggaaatgcctgcacgtcccgttatcccacggtcccactgctaggctggaaggtgatggcatcagctcccggccagtgctgggggttggtctgtgttatctgccacctcaccgtctacactggcaggccctggagcatcttggtatagacaggcaggcattgagaaagagtctgagactggagacccctgccatgcgcagtgggaaggaccatcacggtcgcttagcaatgtctgccacgggggtgggctgcagtgggggacacgtgaacgcccatgcctctccctgtgccaagtgacgggaacttggaacatcagtgaggccaagactggtcttgagtaacttcgggtccctaccttctgagtcctagaaccacattctgtttcttggaaggaaacagctataggcttgagttccctgtcaaccctcccttccactgaagtgtgacaaggagcttatgactcggggcacaggctatcgtggaagaaagacgcggatcctgttaacccagtacaggctgctgctgagctcagctgcgtggtaggggagtgagcccaggcaccacccctcgggcctggcacagctgccaggccaggttcctgctgtcgagtgtgcggcttgttggggcctgtggcagtggctccttgatacaaagctcgtttcagtgccctgcctttggcagccttgtctgggcaggacttgggcagcgggaagggctaacgatcggccccggggcctgccgacactctggtttgtttacccccgacctctgctctttcttcctctgtttctcccagcccatgaaacccctgaaggccaccgccaccacctcccagcccgtgctcaccatccagcagatcgagaccatcttctacaagatccaggacatctatgagatccacaaggagttctatgacaacctgtgccccaaggtgcaacagtgggacagccaggtcaccatgggccacctcttccagaagctggtgagtctgccagggatggagggtcctcacgcagggcctcagtggagcccatagtgttgcaggagcctcaggagaggaccgggcagccctctcggactccttgaaggcctgagacctctccgagtccgggaggaaggcctgggcctgtgtgttatggggtgcctggggccggggccttgactctaggcctcccctggtgcagccctgggagcttctggggtggtggagacaggctgtgtggataggtccttccaggggtggtggagatgggctgtgtggatgggcacttctgtgggagcaccatctctctcccggagggtgctccttctccctcccggagggtgctccgtctttcccggacggtgctccctctctctcccggagggtgctctgaggaaccagccctggaatgaaggcttcttgctgggcttcagtctcctgtccctcagtgaacagaggggcacatgccgggttaggggcatgaggactgctcccctgagacctcgggtctgtaaaaggaagcagttgggcacactggccgatgatcctctcctgaggtcccaagagcaggaagcactgaagcccagccctgctcaccactgcagggtcgggagcggcaggagtgggtgggttaacatgcagacctcgtgttgggaaacgttcacagaagtcttctggttccctgtgcttctgtgacaccctctcccccagctctgccccatctctggctgtgtcccctggaggacccccaggtcagactcatggagctccctccccacctctgctacgtaacgtctgaccgcccagcaggcaagagggagactgggagtccaggccgcggttcttctctgggtgtgagtggccagaggaccttctcctccttcctgccctgttctctgggtgtgagaggctggaggcctcctcccctcccctgccgtgttctggctgaatggacagggctctgcctttctcacgctggagaagactctccctctcctgcctggacactcctaggacctctagctgagtgtgttcagagctgagctccctgcctccggcgtcacctgctccgcttcctgtctttacctcaccgagtgcttcagactctttctggctgcaccccctcccccacctgtcctgtggactccactttttggccgttgctcacagccgccttttcctcttcttggccacccatggccctcacctggacagctgcgtatcctcctgtgtggctcctgcctccaggcccactcacctcccacccccacctctccttagaggggagagagtcactgaaacctcgacggccccttcagcggatccccacggccctcggatgaaggtcaggctccgaggaatggctcgagagaccctttgcacactgacccgtgtccagccccagccttggcagcttcctccccgcacctctgtgctcctgacactggactttctgttctcagttcccagggcaggcactttcttaactcttggtacttgaggccccgtgtgcctgaaacgtccttccccctctcgtctggcctcccctggtcagttcccagcttagaagggacctcctccaagaaggctttccaagtcgccaaatgcaggccttgtgccagtcctcgtagtgagcactagtaactgcctgactcccccaaaccacaagttccaggaggacggactgcatttcctttttttgttgagacggagtctcactcctgtcgcccaggctggagtgcagtggcgtgatctcggctcactgcaacctcctcctcgcgggttcaagtgattctcctgcctcagcatcccgagtagctgggattacaggcgcccaccatcacacccggctaatttttgtatttttagtagagacggggtttcgccatgtcggccaggctggtctcgaactcctgacctcaggtgatccgcccgcctcggcctcccgaagtgctgggattacaggcgtgagccaccgcgcccggcctgcatttccttcttcttagactcccagaaccagcccagtggtcactgcttgaatgagtgaatgcaccgtgaccttgaccactgggcctcgggagaactcggaagggcatggagggagacgttgcagggcctgagatttctgtcctgagagtcctgtttctccagcacagcttctagagccgtgtcacaaagtgggcttgaatcccagcgctgccagattaaacctgcaactgggcaacttacccaaccgctctgaatcagcttcctcatctgtaaaaaacaggatagtaacagtatttacctcattgggtgattttgaggagttaatatctgaaaactgcatggggctgagtgtggtggctgacgcctgtaatcccagcactttgggaggctgaggctggaagatcacttgaggcttagagttcaagaccagcctgggcaacatagcaagaccctatctctacaaagaaatagaataggcctgactgagcgtggtggctcacgcctgtaatcccagcactttgggaggccggggtgggtggatcgtgaggtcaggagttcgagaccagcctggcctacatggtggaaccccatctctactaaaaatacaaaaaaattagcagggtgtggtggaatgcacctgtagtcccagctactcagggggctgaggcgggagaatcgcttgaacctgggaggcagaggttgcagtgagccaaaaccacaccattgcactccagcctggatgacagactgagactctgtctcaaaaaaaaaaaaaaaaaaaaatggctgggcacagtggctcacgcttataatcccagcaacactttgggaggccaaggtgggcggatcacctgaggtcaggagttcaagaccagcttggccaacatggtgaaaccccgtttctactaaaaatacaaaaattagccgggcatgataacacgcacctgtgatcccagctactactcgggaggctgaggtgggagaatcgcttgaactcgggaggcagaggttgtagtgagccgagatcgtgccactccactccagcctgggcgacaagagcaagactctgtctcaaaaaaagaaatagaatacaataaagtaaaagaaaaagtgcttggaacagggcctggaacatcataaattaataagtactcaataactggtcattatcatcagtgccattattattattattattattattattattattattattattaaattgggaagaggcaccctggaaggtatccttccaagggaatgccacactctggttctagcatacccccccctgctccctccggttcagggatggtgaacacctgtcatcactgcctgctcacctgagctgagtggcctggggggcatcctctcctcatccctcaggagggtagaggagagcaaacctagggttgctggaaacgctgtcacagtttatctttgtcacttggacctggctgtccccggttctggtcttggctccacaggcctggccgtgaatctgctacccaccactttccctccccagcatcgtgaaccgatgcctgaggcccctggggctgcagatttgggagggcccggggggagccgggtcaggtctggcatccggaggtggtttattttcagccgaagactctgggtatttgattattcgttactgagagaagggaattagcgtctctgctgtttgttttatgagatcactccagtgccaggctgctgtttccaggcaacctgcacttcccagttaatgaacctgccaagccaggcctcgggccctaccgcctggggtgactgtggcagcggcagtccctgagattaccgtgaccctggacgcaggcctccgcacggctggctcctgcccctggctcctgggagggtggtgtgccaacccgggcctccaggctttctccttcttgtgggaaagggggcaagaggagccttttcctggaagaatatcggtgatctgactttggcttaggcagcgactgtctagtatgcctcgtgtagcgtgggcattgatgggccgggcctcagtactccctggaaaaggaaataaactccctcccgtccggccccgcccccttttaaggtcaggccccaccccctttaaaactcaggccccgccctcttttaaaagtccggccctgcccccttttaaagtcctgcccttctgcagctgagacctgaatgcctctggccttggcgtcacgccgggcgtccccactcgcgctcccctctggcttttccagatgccccccgctcccctgccccaccagcttcctcaaagggctctgcctctgtactgggaggctccaggctcagccgatgctgcggccagcctgcccccacccctacccccaccccagcctctctgggtccttggggagcatgaggatcctgcagaaagcagagtggtccggggtgggggtccacagcagcccacttcccccagcaccttggtgggaagcagaggcccctgaggaagccaggcagcagctgtatcccccttgctgctgtattgaaaaacatttaaaccagaaactccaaagaataacagcagaaccttctaatgaagaaaatacagcgtcacacatgaaggtggagtctcccctccctcctccctcttgaagcagctactggcatgaatttggtggatagccttccagactgcagtttgtgtgtttactacatatctgtatctattttgggttggcctgtactttaaaaaaaaaaaaaggtcttgctatgttgtccaggctggacttgaactcgggctcaagtgatcctcccacctcagtctcccaagtagcgagggctataggtgtgtgtaccacagctcccagctgcatgtactttaaaaatgtgtctaagccaggcgtggtggctcacgcccgtaatcccagcactttgggaggcggaggcgggtggatcacctgaggtcaggagttcaagaccagcctgaccaatatgacgaaaccctgtctctactaaaaatacaaaaactagccgggtgtggtggtgcgtgcctgtagtcccagttagtcaggaggctgaggcaggagaatcacttgaacccaggaggcggagtttgcagtgagccaagatcgtgccagtgcactccggcctggttgacagagcgagactccatctcaaaaaaaaaaaaaaaagtgtataagtatacacatatatcatattttacagttcaacccatgttcgttttggagcttgtcagcaatcgtattttacagttcaacccatgttcgttttggagcttgtcagcaatgctatgtgtaaatcgggtgcatccatgttcatggctgtgtgcgcggcttcccccgtttgtgagcatttgttaccagtccctccactatgaggaggaaaagtgagatggtgaacacccttgagtcccctggggcacacacataggccatttgctccagagcactgctgtctaatggaaatagcttatgagccacgtacatcatttcacattttctaatacccaccttttttttgtttttttgagacggggtcttgctcttgtcacccaggctggagtgcagtgatgcaatctgggctcactgcaacctccacctcctgggttcaagcgattctcctgccttgtcctcccaagtagctgggactacagatgcgtgccaccacgcccggataattttgtatctttagtggagacagggtttcaccattttggccaggctggtctcgaactgccaaccttaggtgatctgcccgcctcggcctcccaaagtgctgggattacagttgtgagccaccgcgcctggcccctaatacccacatttttaaaagtaaaaataggcaggtgaaattaattttgagaatatcttttatttattcccgcagatccaaatattatttgaacatgtaatcagtatttaaaaattaacgaggtaatttacattctcttttacatactaaggctttggaacccactgtgtattttacatgtccggcacgtctcagtttgaaccggccgtatctcaggtgcttggtagcctcaggtagctggtggcgactgcactgaacgatacggctctgcagtttgtatgtaaaagtggatttgctaagcaatcgatgggctgtgcctatccacactgttattagttcaactgaaaataggccatgcctattctcagctttattagttattaacaaattgctctccaaataattgtactaatttacacttccccgagtagtctaagagtttaaattggccgggcgcggtggctcacgcctgtaatcccagcactttgggaggccgaggcgggtggatcacgaggtcaggagatcgacaccatcctggctaacatggtgaaaccccgtctctactaaaaaaaaatacaaaaaattagcctggcgtggtggcgggcgcctgtagtcccaaccactcaggaggctgaggcaggagaatggcgcgaacctgggaggtggagcttgtagtgagccgagatggcatcactgcattccagcctgggtgacagagcgagactccatctcaaaaaaaaaaaaaaaaaaaagttttaattggccgggcgcagtggctcacacctgtaatcccagcactttgggaggccgaggcaggtggatcacctgaggttgggagtttgagaccagcctgaccaatatggagaaacgccgtctctactaaaaatacaagattagccaggcgtggtggcgggcgcctgtaacgccagctactcgggaggctgaggcaggagaatcccttgaatccgggaggttgcggtgagccgagatcgcaccactgtactgcagcctgggcaacaagagcgaaactccatctcaaaacaaaaacaaaaacagggagtttaaatttccccatatgcttgccagccgttgctgtcaattagacttttaaattttgacccttctgatgagtataaaatatctcgtgatggctttaatttgaatttctaccctttggtcccttaagaggaagtgcttatatacagcgcagcgaagcctttccataaatatttggggaattgacttatggagcctcggtttccccttttgcagaaaggggcgatggggtctgccctgcctctcagaagaggcgaggctctgtgtggttgtgactcaggttgtgactgtgtgagtgacaggcaaacgtgtagtgaggctggggctttggctccttggaggtagaggaggtggaagaggtgaggacggggcctcaaggccaagggaaatggaaagacagcatcttcatttgttgttttgttttctttttgagacggagtcttactctgtcacccaggctggagtgcagtgacacgatcttggttcactgcagcctccacctcttgggttcaagcgattctcctgcctcattctcctgagtacctgggattacaggcacgcgccaccatgcccagctaatttttgtatttttagtagagacggggtttcgccatgttggccaggctggtctggaactcctgacctcaggcctcccaaagtgctggggttacaggcgtgagccgccacgcccggccaagacagcacctttaaatgtcgttccccacgctgcacgtggggagggaggcctgagcaggccacacgtgccagctccccccagcacacacacccccctctctccctgctccggctaattccaggatgtgaaggaagtatgagacattaagggatttcaaaccctgggagaccttcaccgtgctgaggaaagctggatgctgtgaagagttgaatttctagcaggccaacaaaggccctagcctggtctccccaaccccagaccccctcattaaccttattggctgagctggtttccatggaaactgtccagttcaaagggacactgtaatatgttcatccctgcgtttccccaagttcccaacgagctgagtgagaggttttcagtgcaggggagctcccggtgctccgtgaagctttcatccattcattaatcctctcccctcccaccctcctctccctctgttccctgactcctccctgcaggccagccagctcggtgtgtacaaagcgtttgtcgataactataaagtcgctctggagacagctgagaagtgcagccagtccaacaaccagttccagaagatctcagaggtaggccgctccccacatagccaccctgagggacaaggagctttgggggctgctcagagcccttggtctcccctccctcgcttgccagtcggtgaagtggttactctaatgggtaacacttagcctgatatttgctttcttgcacctgacattttccctcttaatagaaaacgatctattttatttatttttttattattctctttcagattagagagaggaacaggggaggcaaaaaaaaaaaaaaaaaaaaaaaatccaaggcagtgttctcccacaccacactatggtgaccttgagcaagtcacgtcccccctcttggcttttatgtcctgtccggtagaatgaggggtttagaaatggccagataatccttttttttttttttttttttttgagacagagtcttgctctgtcgcccaggctggagtgcagtggcgcggtctcggctcactgcaacctctaccccctgggttcaagtgattctcctgcctcagcctcccaagtagctgggattacaggcgcacaccaccacgcctggctaaggtttgtatttttagtagagatgaggttttgccgtgttggccaggctggtctcgaactcgggtgatgtgcccgtctcagcctcccaaagtgctgacattacaggtgcgagccactgagtccagcttggccagctaatcctgaccttgcttgataagaatcactggggcattgtttaaaacacagatttcctggcaccttccccggagcttctgattcagaaggctttgcgtggggcccaagattctatatttgaacaagcttctgggtaatatttatgacagggaagtcttgaggaaatttggactataggtcgtcttttaaggttcttgccaactctaagactgccatcccataaacacaaaaagggtaagagccacttatgtggagaaggagccttagaatccctggccgggaacacgcgtgcttctgctcctgaggcccagccttcctggccaggaacacgcgtgcttctgctcctgaggcccagcctacctggccgggagcacacgtgcttctgctcctgaggcccagccttcctggctgggaacacgcgtgcttctgctcctgaggcccagccttcctcccgcactcctccacagggcagaggtgcagtcctatctgccatcaacatttctacctaagaggtggcatggagggacagttgcttaggatccttcaggacagagcccagttcatccctttgtccaaaaagacctcagtggcacccctgaagcactggcctgagaggaacagcccccagctcagggcaagagaacctccatcctagaaaaggggagaagcttctgcagttttgggagtcctgccgtaaaggcccctcttggccctttgtgttcccgtctcagctctaacgctagaagagttggggaaacgcagggtagttttcctgaaacttcaggggtgacggtcgatgcccacgtttagaatccaccgagaggcagcagagaagctgacagttggagatgaacatgtcaccttcattactgttaaaaaaatgcagcttggaaaatgtggatttggatctgtagccacagtgggcttgctgacacttcgcctctggaatgaaacgtacctatagaagccgggcgtggcggctcacacctgtcatcccagcactttgggaggccgaggcgggcggatcacctgaggtcaggagtttgagaccagcctggccaacgtggcgaaacgccgtctctactaaagatacaaaaattagccgggcgtggtggtgcacacttgtaatcccagctatttgggaggctgagacaggagaatctcttgaacccgggaggtggaggttgcagtgagctgcgatcacgccactgcactccagtctggtgacagagcgagaccctgtctggaaaaaaaaaagtatctattgagtcccttgcaggaataggaaaacacaggcccctctccacaatgaggacagagcccacgcctcttacccagtgtgcagagagaggatggctgaccatagtttcttctcccagacccatggagcagatgtgtcaccctctgcctgggaggacgaagtgcagggtggggaagtccctctccatggagtcaagtggctggagaggccaggtgcagtggctcacgcctgtaatcccagcactttgggaggccgaggcgggagattggcttgagcccaggagttcaagaccggcctgggaaacatggtgaaaccccgtctctattaaaaatacaaataaaaggggctggagaaatggtgctttccctgcggtttccagcccaacccaggaactacctggactcccctggtctgtgttcagatcagccctgccaaggccgcccaagatcccggggtcagacatggtgcagagagtgtggggtcttctcttggcctgggctgattgcctgttctctgtgcctaggcagaaacccccacacccaaccataagcccctcacagcctgcccaccctggagggcagagccaggcccctggctttctgccaggtggcttctcatcctgactcactcgatgacgtgcttgcttcctgctgaggctgccacttaattactgcaattaggctcctctctgcagcaggagtgatttcataccctagacttcactggagggggcgtgaggaaacattcccgaaatctgggagtccaggcaccagccagagacacaggctggggacgctgagtatcccccacccccccgccccccaaaatatacacacacccaagctccatctccaggagttttctctgtctagaaacagcttgagacagaagtaggaagttcctgctgtctgagcgcttcctcccctgcagaccaagcaggtggcatcacctcggcagctgaccttggcctcatcacctgggcagctgaccttggcctcatcacctgggcacctgaccctggcctcatcacctgggcacctgaccgtggcctcaccttgcctcctgccttccctcccacacccctctttgaggctccgtgtgctccgtctgccaagtggggatggtattacagctccagttgcaggctgcactgtcctgttagcaaaagctggggctggaacgtctctaaaggaggataaagaggcttggagcagatgagtcatcccgggggtctttccagtactcactacctgctgcctggcttgggatccaggaggggcattggctgttcctccctcgaagcttcctctcggacccccagcatgggcagtggtgggtggggagtgtcgggggtgctgggggctgagtaagtgctctctgatgggggtaggatgcagctcactgtcctggggagctcagcatctctgccgaaggtccaccacttccctgctggcgtgtgggacccttccttcctacctcatgggttcctcatgccctaaagattggctggagtacctggcgctggtcaactcaaaccctgtctgcccttggccgacgtgtagggttcctgagtcggggttcctgtaatcacagggctccctgccagcctctctcatctctgggacctggagtcccttccttcttgcccacgccccagccactggactccacgaggctccaggagttcacaggtgtggtgcaggggattggggtggcagaggcagcccatggccatggggctcctttgtctttctttttttttttttttttttttttttttttttttttttttgagacagagtctcgccctgttgcccaggctggagtgcaatggtgtgatcttggctcactgcaacctccgcctcccaggttcaagcgattctcctgccccagcctcccaagtagctgggattacaggcacctgacaccacacctggctaacttttgtatttttagtagagatggggtttcaccgtgttgaccaggctggtctcgaacttccgacctcaggtgatccgcccaccacggcctctcaaagtgctgggatgactggcgtgagccgccacacccggcctctgttctcatatgtacaccctgagtttcagaactccccttcttgccaggctcacagtgggggctgggagaggtgagggacagaacaggccatgactcctctcctccctttggcaggaactcaaagtgaaaggtcccaaggactccaaggacagccacacgtctgtcaccatggaaggtacctcggggagcgggctggattacaggcacctacctttgtctggctgtgcaggcaacaggctgcgtgaacgcggcgcccttccccttgtgtgtgcgtgtgtgtgagcgcgtgtgagcgtgagcgtgtgtgagcgcgtgtgagtgtgagctgagtgcgcgtgtgcgcgcacgcgaggactctagcctcgtgcccaggcagccagccagctacaaacgtgctcctctttaggatgccagcaggctgctggctccctccctccctacccctcctccccttccccttccctcctctcctcgccacgcgcctccctcccctcccccttgctggaagagcactccggagcggctgcccgatgctggagtccgtgcggcagcatcagcaaggtggctgagtggccgggctgctggtgggcgccggggagcctggagcgatggctgcacgctcccgccgcggggacagaggctgccatggagattctcctcattattcgcttctgctgtaactgcacctatggtaacccaggtgctcgctgtgggaggtggcggaccctcccacctctgggggccggctggagtgggcttagatgtggccggggaggttagagggccgcagggaaggagggtgggcgagcggctggacctgaattcccccttcgttttggcggcatccagcctagagttgaaacctgggggctgctcagagcagggccgcttgcaaatggaaggaccaggctggaggggtccaggtggccccgaggatcggtggggaattggtgggctagtgtgagagaacttcctggaggggctgttagggagagacggcgacgagctgtgcccgcagacgtagtagccctgaggccagggagagggtctgcgggggccaggcacagcgtggcgatgggtggcgatggtccggacggcggcgttgccagccgagagggtgccagcgcgagccagagggagaagttgggagtttctttgtttctggagagaggcgcggaggctgggcggcacggtattgtgtgctccgcgcacatgcagcagtaggcggaggacacggaggggctgtgggagcaggaaggagaggtttgtttccagccgtgagagacccccagccgaggtctgggccctcaactgtggaaggcaggtcggcagggccagcgggagaggggtgtggcaagctactctgtgaaggtcacacacacacacacacacacacacaccacctttcggtggaagggacccggaccatcctccttgcagctcccgcagctggctgggggctggggggaagtcccgggacaggtgcatgtcatcaacacgactgtcggtcgtaggaggatgaagccggcccaggtagggaggtgtccagaagcccgtggaccctgcctcaagaggcaagacgtgccaaggggtgccctgcctgcctgtggcagggagtggggtgggcacgtgtggctcccaggccggctgctctgggcctgagtctgtgggagcagcaggcggctggttttaggaccttcctcttccttcccaccaggtgtttcggctctgcacccttctcagtcactttgctttcctatctccctggtaacctggagctccttggagctccttgtcgaaggctgacttgagggggatggtggcttgccggaagagagatggcaggtttcctgggctccttcccaggggcggctgtgctggaggggctgtgtggggccagtgccccctgaccttctcaggaccctcttgatggaagcaagctctgaggcagcctctctcctgcggcccagcagggcggctgcaggaaccctgttctcacttgaaattggcctggtcagcgatcagaggagaaatggtctttttggtctggcctaggagttggtcaggtcttgactctgcctccctgaaaaggaaacgtacccttggcttcctctcccttccccaaaaggaagcttcgactcagtgaaacggacctgggacctggagttcacgttgcttcggtctccgtgatactgttgttgaagtcggcttcaaagtggggaatgaggagtgaaagggccagctcgtgaggagggggctcaccccatcctggtcactctttccaagaacgctcctgtggttcattgaggttttacaggtgctgcctttccctgaagaaggtgcagctcaaagcaaggagtgcgggtggatctacccagctcccaccacttgtagccacaagtctctggcctcagttgccttgtctgtaaaatggggctagtgagaattgcttcccgttttaatcacaggaaataatgagagcaaagcagttaactcagtacccttgggcacagagcgagtacccagcaaactagagagagaccagcttgctgcccaagtcagtgtcagtggagagggagagtgggtgaggccgggcaggaagcaggccagcctgcaggagcccagggacaggggaagggccagagcgagtgcctcaccctgagttctcaggggaccccagcgtgcaggggccgtggggagcacaaacttcagggccgctcttattcccccggttccctccgtatctgatgtggtcccagtgccgccacccccccccgccccccgccccgtgcacctgccctcctggccgcccttccagggctcattccacagccttactcaggtggactctggaggtgaccacagacatgttaataacccctctgaaacccaacctgccatgtgttcagacctctgagcttagtcagaaacctcttcctcttgggacccaagagagggctgcggggagccgataatgcagtgtcagctttctgtggagccgccactccggagcccaccctggcaggtgtctgctgagcttgtgctttcttttgggtctctggggttctccagtgtgattttttccccctgaagatgggctgagccacaggtgggtgccttaaacagcctcagaaatggatcccacctgagctaggacctgggctgcaccctcagtgccgaggataccccaagactggcctcattccttcaagcttccatggcccatggggagggtctctggaaactgctagataagaaagggctacagatatgtcatatgaagtgtatttacgtaaaccagtggttggccgggtactcatgcctgtaatcccaacttttggcagactgaggcaggaggattgcttgaggccaggagttcgagaccagcttgtatttggcttgaggccaggagttcgagacgagcaacatagtgagaccttgtctctatatttatttttatttaaacgaagactcactgtgtcgcccaggctggagtgcaatggcgcaatctcagctcactgcaacctctgcctcctggattcaagagattcccctgcctcagcctcccaagtagttgggattataggcgcctgccaccacacctggctaatttttgtatttttagtagagatggggtttcaccatgttggccaggctgttcttgaactcctgacctcaaatgatccacccgcttcggcctcccaaagtgctgggattacaggcgtgagccaccctgcccggcccctcgtctctatatttttaaaaaaattaaaataaatacataaataaaacataaagcagtggttttcaaccattattatacattcaaatcagtaaagaagctttatagaaatgctgatggcccttgtggtcttgcagagatttgggttgagttgacggggctggggagcaggcatctgtatcttttaaccgctcccccagtgattccgacaggcagccaagctcggactgcgggtaaggctggtggccctgctgaggctgcattttcttcacagccagcagattgctccctgaagtgtctgcttagccgcgcacggggtatttatatctcaggctttggagaactatcgggtttggggcccggctagggcgtgcgtgttcacgctgggacctgtcacaacctggtcttatgggacacccagtctgggatccttcttcccagatgaccaacctgcctctgtcactgcccctgcggcaggaggcccaaggtcatgaccccagggacagagcatccaggtgcaggactgaagctgagcctcctgttgggagggtgggcgcagccgcgtacaggaagggtgttgggaagtgttgatccaccagctgccacctccacctgtccctgctgaatcccagccatcctcacttggtgtccgggttgtggagggtgtggctcttgggggcctgggctggccttgcctgcgtcctcccagcctctttggggctctcatatgtgaggcctaacctgagttgcttcaggaaacctttgcccctcaggctgccacgtgtttgagagcacagccttttttctttttttttgagatggagttttgctcttgttacccaggctggagtgcagtggcatgatcttggctcgctacaacttccgcctcccgggttcaagtgatttccctgcctcagcctcccaaatagctgggattacaggcatgtgccaccacgcctggctaatttttgtatttttaatagagatggggtttcactggttggccaggctggcctcggggagcagagcctttctgtggagatcaggccagcctcctggcctccagcctccctgcctccagccttcctgtgctttgctatctggggtttgaggatgtggggaggggtctttcctctgagagatgaggccagtcctgtggatcacagtgaggcatgccaatcccagctggctgtgcctggccttcagctccaggagcctgagaatgataaggtctggggagctgcccttcctggaaacacagcatgtctccttcccccattctggggtcctgcatgtggcaggtgtgctagactctgcagggcatggctgggtggagctgtgtgattctggggttctgcgtgtggcaggtatgctggactctgcggggcgtggctgggtggagctgtgtgattctggggtcctgcatgtggcaggtgtgctagactctgcagggcatggctgggtggagctgtgtgattctggggttctgcgtgtggcaggtgtgctggactctacggggcgtggctgggtggagctgtgtgattctggggtcctgcgtgtggcaggtgtgctagactctgcggggcgtggctgggtggagctgtgtgattctggggtcctgcgtgtggcaggtgtgctggactcttcggggcgtggctgggtggagctgtgtgattctggggtcctgcgtgtggcaggtgtgctggactcttcggggcgtggctgggtggagctgtgtgattcagggctgggggtccaggagagcatctgccttgagccaggtgaggccaggacaggcctggggaggggggcggggcggctctcgatgaagccatgtctgatgggagaggaggcagggctgcggagggagcaggggctgccagggctgtgtgtcacctgtgtctgctgtttggtcggcccggggagtgagaacagaggtgggggctgccgtgggctcactctggtgtccctcgaggggtgttcacgtgggaagcatgcgggtggggggacgaagctggtctctggggtgttgggttgccctcgtccatcatcctcttcctccttctccctgtctcccccgacagctctgctctacaagcccattgaccgggtcactcggagcaccctagtcctacacgtgagtgtcaagcctccgaatggccagagagggcttaggagttcagtggaagactgagcctgggtgagagggtgctggagtcaccgagaacagtccacctggggaatcaggggttcctaggctccaaggatgcctgtctggcccgcggtatccgtgccgccaggctagggcctgaatacagcttggctactaagcttgacgtggccaggtgctcccggggaggcaggcattcctgcttccccacccgctgcctcctggtctccagtgtccttggagcagctgcagggcagacacagggtttctctcccagctgctcggggggatgagcctccacctggtctccacactggggagagagtatgactgtggccaggagaagagggggcagccagggccctctcccctgctgtgctggctctgattttttttttttttttttttttttgaggcggagtctcactctgtcacccaggctggagtgcagtggtgcgatcttggctcactgcaacctctgcctcctgggttcaagcaattctcctgcctcagcctcccgagtagctgggactacaggcgcccgccaccacgcccagctaatttttatatttttactagagatggggtttcaccacgttgcccaggctggtctcgaacttctgacctcaagtgatcccccgcctcggcctcccaaagtgctgggatttcaggcatgagccgccgtgcccggcctgactctgatttgtagttcagattttgcgggaattaggcaggtccctgagtgcccaccctttggatggggactgagcactccccggtggccacacatcaggccccagagccgctcccctcaactcaccgcctcacccttcccaggacctgctgaagcacacacctgtggaccaccccgactacccgctgctgcaggatgccctccgcatctcccagaacttcctgtccagcatcaacgaggacatcgacccccgccggactgcagtgacaacgcccaagggggaggtgagctcagagcccggcacggcccctcacccaggctgagaagtatcaggtccctcgtccccttctctcacacacgggcggcaggtccctcgtccccttctctcacacacgggcggcaggtccctcgtccccttctctcacacacgggcggcaggtccctcgtccccttctctcacacacgggcggcaggtccctcgtccccttctctcacacacgggcggcaggtccctcgtccccttctctcacacacgggcggcaggtccctcgtccccttctctcacacacgggcggcaggtccctcgtccccttctctcacacacgggcggcaggtccctcgtccccttctctcacacacgggcggcaggtccctcgtccccttctctcacacacgggcggcaggtccctcgtccccttctctcacacacgggcggcaggtccctcgtccccttctctcacacacgggcggcaggtccctcgtccccttctctcacacacgggcggcaggtccctcgtccccttctctcacacacgggcggcaccgggtgcctcctgcctctccaatcctgatcccccattcccagccaaggagaggttttcagcccttggtcaccctgatgacctgcagctttccaggccctaggctgagaagtttaagtccagtgtctcattaatcctcataataatctagggaggccgggcacggtggctcacacctgtaatcccagcactttgggaggctgaggcaggtggatcacttgagttagaagtttgagaccagcctggccaacatggtgaagccccgtctttactaaaaatacaaaaattagctgggcgtggtggcggatgcctgtagtgccagctactcaggaggctgaggcaggagaattgcttgaacccaggaggcggaggttacagtgagccgagatcgcaccactgcactccagcctgggtgacagagtgagactccatctcagaaataataataacaatccagtgagccagaagaacctgaggctggggagtctctccaggtccaccacgcagtctttcagccactggtgtcagagctggattcctcacctgggactgtctggaggcccacgccggggaagtggcctccgggtgcctcattcttgaatgcagacacctgcctctggccagtgtgatgccgtcagggtctcctaggaagcgaagggagcaggagcttggagctgcttcagctcggcctgcacacgcagtggcttgcggggagcccacagcaggaaaggctggcgttggaggtggtggaggccgtccaggttgccggaatgtccagtgggcacctgcatgtgggacagccgttccctgggggcccttcttgatgcaagggtggggacagcccagcaaggggagtaccaggaagcatgagagggacagttgccttcgtggattggcagccgggcccgggtgaaaggcttcctgtccaggggaggccattaggcggccgttacgagtgaggctgacagggtgtctgctcctgtggtctgtttacgagcccccagggtctcctggggagaaagtggtgagggacaggcctggacagtgtccactgggcagagagagccgattccgtgcggctcctggtgctgatgtgcagcgtctggggatcccgtcgtctgttttactctggggatatctgaaaaatctccagagggcttagcgtaccctccgttttcagtcatcctttttttgagactgaatctcattccatcgtccaggctggagtgcaatggcgtgacctcagctccactgcagcctccaccctctgggttcaagcaattctcctgcctcatcctcccaagtagctgagattacaggcaggcgtcaccatgtctggctagtttttgtatttttagtagagacggggtttcgccacgttggccaggctggtctcaaactcctgacctcaggtgatccacccgcctcagcctcccaaattgctgggatgacaggtgtgaaccactgcgcccggcctcggtcatcttaattgtatactttgaatacgctcacctacgtattacagcagatgtaggtcacaccgtgtatcatacaggaaaggctggcacagatggggacgaccccccggctctgagcgggggttggaaactctggaactcccacgtggagcagaaaccacccagagcccaggttagagttggctgcaggtcccctctgggcactgctgcagtcccaggctggagggcccaggtctcatccccagggggctggagaagccagggaggagtagcacagacaggcctgagtgggtctcgggtctcgggtctcggttgagccggggctagatgaagttcgccgccgcggtcgggagggattgcaaacggggatgttcgtgccccagggtggagaaaccaggtcgtccagggcagggggctccagggttagccgcggagagccccgtgcgttgcacacacttaatgtgccaggcactgtgctgtttcacatgcaccatctcgatgagtcaccttatgaggcagacctcactgtccgcacttaacagaaggtgaatctgggattcagagaggtcagggagcctgtctgagatcacagctgagaagcctgttggcattcaaacccatgcccatgtgactccaaaggcagtgcttgaaccacctttggttaagggatgacaggctatgccgcctctcggtccagtcctccctggctggccgtgcccccgtgtgcaggctctgccctcggccgcattcccctctgagcaggctggggggtctgccatctccctcagacgcgacagctggtgaaggacggcttcctggtggaagtgtcagagagctcccggaagctgcggcacgtcttcctctttacagatgtcctactgtgtgccaagctgaagaagacctctgcagggtgagtgtgtgagtccaggggcacggggcgggggagggggtccggacctctgcggggtgagtgtgcgagtccggggcgggggagggggtcctgacctctgcggggtgagtgtgcgagtccaggggcgggggagggggtccggacctctgcgaggtgagtgtgtgagtccaggggcgggggagggggtcctgacctctgcggggtgagtgtgtgagtccagtggcacagggcgggggagggaggccggaccctgccacccatggagccttcagcaactttgttggttttttttcttttgagacagggtcttgctctgttgcccaggctggagtgcagtggtgcgatctcggctcactgcaacctctgcctcccgggttcaagcgattttcctgcctcagcctcctgagtagctgggattacaggtgcacgccaccatgccaccatgtctggctaatttttgtatttttagtagagacggggttttgccatgttggccaggctgatctcaaactcccaacctcaggtgatctgcccgcctcggcctcccaaagtgctgggattacaggcatgagccaccgcgcctggccggttttttccttttaaaaactatattaattaacttaatttcactacatagccttttttcctgaaagtaagtcatgtttttaattataaagataatataaggccattggaggaaaccccgtcccccactgaagcatgaggtccgactcctgccgcgctgcttccttccctgtttttaaatgttctcatgtttcttcacacagtcgtaatcactgtgaatgcccaatttggggctctgctgtttctgtttcgtgtcataagcattttccctgttgctgcctcatcttcataatcatccttttactttcctgcacgatgttacccgtagatgtgccatcgtctacttaagcattctccttttattagacatctctgaatttctgctaactgcagtgctgtgaatattcaccacgtctcctgctactatttattgagggtttatgccatgccaggtgccgtgacacatgctttgaatacatgatttctagtcctcccaacacctccacaaagtagcgactgttgttccctaatcatagatgagagaggagtcttggagaaggtaaataagcagcccaagctcgcacagctagaggcacaggtgggactggaaccccaagctgacgtgcaaactcctttgagcctccttctctctacccgggagggtgggactggaaccccaagctgatgtgcaagctcctttgagcctccttctctctacccgggagtgtgggtctgctctgtgccttgagcagaggctcattctgcgttcattcacacattcttccacccacacttagtgatcaactgcagtgtgccaagcacaccccttctcacggctgagaagcggcagtctggattcaaacccgtgtctgtgggactcgtttaccatcaggctatcttgcctctcccttcagccctccctggttggctgtgcccccaagtacagcacaggggactccacagccagtgtgttacaccaccaggctatcctacctctcccttcagccctccctggctggctgtgcccccaagtatagctcagggggagcaagccccacgcccacctcaacactcaagggtcagaatgagaagtgcaaatctaagtcctaggggaaggatcgatgattatgaacgtcaataaagggatgactgggcgggcacggtggcttatgcctgtaatcccagcactttgggaggccaaggcgggtggatcacctgaggtcaggagtttgagaccagcctggccaacatggcaaaactccgtctctactgaaagtacaaaaattagctgggtgtgatggcaggcacctataatcccagctacttgggagaatgaggtgggagaatcgcttgaaccctggaggcagaggttggagtgagtggagatcgcgccattgcactccagcctgggaacaagagcaaaactccatctcacaaaataaaaataatttaaaaaataataataataaaggacatgactccctggaactagatcatgtttgagatagttctgaggcagagatggcaataataagcacacatgcttctgcctgtcgtcctttgcgatggcagacattactaatcacatatgcctctgcctgctgtcctttgccatggcagacatcactaatcaactagggcacactttcttgctagacttggatgtggctttgtaatcctccacccagtgttgacccatgtgaccactcttgataagaggtggcatttggaataacacctgtattccattgctagcctgaaggatattgaacacggatagtctagaagggagggaggggattgtggtggggaataggaaaatgtgagcccagccaggaaggcttcgctcttcttgatacctaagtggtttgggatgtttgacaacatgagtcatctgggccagaagcctggtaaggtgaaggggcggagttgctccctgcgggcggggcggaccccagaacccagctttcatcactccagtgtgtgtttcccaatcaggctcctcaggagcagggatcgttcgtgcttctggcgagttctcagtcaacccgtcagtggttttgtggttctggacccaagagttgaggctggaagagccaggctccctctggctcatggctccctctggctcgtttgcaggaagcaccagcagtatgactgtaagtggtacatccccctggccgacctggtgtttccatcccccgaggaatctgaggccagcccccaggtgcaccccttcccagaccatgagctggaggacatgaagatgaagatctctgccctcaagagtgaaatccagaaggaggtgagcagagcttggtatctgagcctggggccctttgagccagctgtgttgggggaggtggaggtgggaagttgtaaggtttgagactttgagagggagccttgagtgtgtagttactaagggaaagaccccgactacagtagctccaagcagatcgagggggtcagtgctcaggatttcatagggctaacatgggaagtgccctggaaagcagtgcatgttgaacacgatagaaaggggaagcaagtagccaggcgcagtggctcacacctgtaatcccagcactttggaaggccgaggcaggtggatcacctgaggccaggagttcgagaccagcctggccaacatggcaaaaccctgtctctactaaaagtacaaaaattagcagagtgtggtggtgggcacctgtaatcccagctactcgggaggctgaggcaggagaatggcttgaacccgggaggtggaggttgcagtgagccaagaacatgccaatgcactccagtctaggcaatagagtgagattctgtcaaaaacaaaaaaaaaaagtggaggtagagggaagcaagagaagaaaaagcaggcttttgtaaggaaaagcaggacctgtgcaaggaaaaagacctgggaggcctctcagaaactgacagatcaagtaggcaaataaataaggagagagaggccctgaatgccacaattaacatgcttgacttaaaaatgcagagaagcttgtgccctgacagaaaactgagattcttgtcacacacgtttgggaccttcacatttatcctataataggccactaaggaaatctcaaaatttttctgcaagttgatagcatacaagtcatgttcacagaccacagtggagtaaaattagaagtgaacaagaatattggtcagcctgggtgcagtggctcacacctttaatcccagaactttgggaggctgaggatggtggatcgcctgaggtcaggaattcaagatcagcctggccaacatggtaaaaatccatctctactaaaaatacaaaattatccaggcgtggtggatcatgcctgtaatcccagcactttaggaggcccaggcaggcaggtcacctgaggtcaggagtttgagaccagcctggccaacatggtgaaaccccatttctactgaaaatacaaaattagcctggcgtggtggcttccgcctgtaatcccagctactcaggaggctgagacaggagaattgcttgaacctgggaggcagaggttgcattgagctgagattccgctgctgcactccagcctgagcaacagagtgagactgtctcaaaaaaaaaaaaaaaaaagcattggtttggaaagttcaaactgacaaggtaaagaggaaatcaaaattcaaaatgagaactgcaaactgtttagtgctgtctggaaatgagtgtactacataccagtacccatggatgcagccaaagtgctgtttagaggaacatgaatagccctcagttcacataacaacagtgtctagaggaacatgcatagccctcagttcacataacaacagtgtctagaggaacatgcatagccctcagttcacataacaacagcgtctagaggaacatgcatagccctcagttcacataacaacagtgtctagaggaacatgcatagccctcagttcacgtaacagcagcgtctagaggaacatgcatagccctcagttcacgtaacagcagcatctagaggaacatgcatagccctcagttcacgtaacaacagtgtctagaggaacatgcatagccctcagttcacgtaacagcagtgtctagaggaacatgcatagccctcagttcacataacagcagtgtctagaggaacatgcatagccctcagttcacataacaacagtgtctagaggaacatgcatagccctcagttcacgtaacaacagtgtctagaggaacatgcatagccctcagttcacataacaacagtgtctagaggaacatgcatagccctcagttcacataacaacagtgtctagaggaacatgcatagccctcagttcacgtaacagcagtgtctagaggaacatgtacagccctcagttcacgtaacaacagtgtctagaggaacatgcatagccctcagttcacataacaacagtgtctagaggaacatacatagccctcagttcacataacagcagtgtctagaggaacatgcatagccctcagttcacataacaacagtgtctagaggaacatgcatagccctcagttcacgtaacagcagtgctagaggaacatgcatagccctcagttcacataacaacagtgtctagaggaacatgcatagccctcagttcacataacagtgtctagaggaacatgcatagccctcagttcacataacagcagtgtctagaggaacatgcatagccctcagttcacataacaacagcgtgtggaggaacatgcatagccctcagttcacgtaacagcagtgctagaggaacatgcatagccctcagttcacataacaacagtgtctagaggaacatgcatagccctcagttcacataacagtgtctagaggaacatgcatagccctcagttcacataacagcagtgtctagaggaacatgcatagccctcagttcacataacaacagcgtctggaggaacatgcatagccctcagttcacataacaacagtgtctagaggaacatgcatagccctcagttcacataacagcagcgtctagaggaacatgcatagccctcagttcacgtaacaacagtgtctagaggaacatgcatagccctcagttcacataacagtgtctagaggaacatgcatagccctcagttcacataacaacagcgtctagaggaacatgcatagccctcagttcacgtaacaacagtgtctagaggaacatgcatagccctcagttcacataatagcagtgtctagaggaacatgtatagccctcagttcacgtaacaacagtgtctagaggaacatgcatagccctcagttcacataacagcgtctagaggaacatgcatagtcctcagttcacataataacagtgtctagaggaacatgcatagccctcagttcacgtaacaacagtgtctagaggaacatgcatagccctcagttcacataacaacagtgtctagaggaacatgcatagccctcagttcacataacaacagtgtctggaggaacatgcatagccctcagttcacataacaacagtgtctagaggaacatgcatagccctcagttcacataacagcagcgtctagaggaacatgcatagccctcagttcacgtaacaacagtgtctagagcaacatgcatagccctcagttcacataacagtgtctagaggaacatgcatagccctcagttcacataacaacagtgtctagaggaacatgcatagccctcagttcacataacaacagcatctagaggaacatgcatagccctcagttcacgtaacaacagtgtctagaggaacatgcatagccctcagttcacgtaacagcagtgtctagaggaacatgcatagccctcagttcacgtaacaacagtgtctagaggaacatgcatagccctcagttcacataacaacagtgtctagaggaacatgcatagccctcagttcacataacaacagcgtctagaggaacatgcatagccctcagttcacgtaacaacagtgtctagaggaacatgcatagccctcagttcacataatagcagtgtctagaggaacatgcatagccctcagttcacataacaacagtgtctagaggaacatgcatagccctcacttcacataacaacagtgtctagaggaacatgcatagccctcagttcacataacagcagtgtctagaggaacatgcatagccctcagttcacataacaacagcgtgtggaggaacatgcatagccctcagttcacgtaacagcagtgctagaggaacatgcatagccctcagttcacataacaacagtgtctagaggaacatgcatagccctcagttcacataacagtgtctagaggaacatgcatagccctcagttcacataacagcagtgtctagaggaacatgcatagccctcagttcacataacaacagcgtctggaggaacatgcatagccctcagttcacataacaacagtgtctagaggaacatgcatagccctcagttcacataacagcagcgtctagaggaacatgcatagccctcagttcacgtaacaacagtgtctagaggaacatgcatagccctcagttcacataacagtgtctagaggaacatgcatagccctcagttcacataacagtgtctagaggaacatgcatagccctcagttcacgtaacaacagtgtctagaggaacatgcatagccctcagttcacataatagcagtgtctagaggaacatgtatagcccgcagttcacgtaacaacagtgtctagaggaacatgcatagccctcagttcacataacaacagtgtctagaggaacatgcataacccctcagttcacataacagtgtctagaggaacatgcatagccctcagttcacataatagcagtgtctagaggaacatgtatagccctcagttcacgtaacaacagtgtctagaggaacatgcatagccctcagttcacataacagtgtctagaggaacatgcatagccctcagttcacataacaacagtgtctagaggaacatgcatagccctcagttcacataacagcagtgtctagaggaacatgtatagccctcacttcacgtaacaacagtgtctagaggaacatgcataaccctcagttcacataacagtgtctagaggaacatgcatagccctcagttcacataacaacagtgtctagaggaacatgcatagccctcagttcacataacaacagtgtctggaggaacatgcatagccctcagttcacgtaacagcagtgctagaggaacatgcatagccctcagttcacgtaacaacagtgtctagaggaacatgcatagccctcagttcacataacagcagtgtctagaggaacatgcatagccctcagttcacataacaacagtgtctggaggaacatgcataggcctcagttcacataacaacagtgtctagaggaacatgcatagccctcagttcacataacagcagtatctagaggaacatgcatagccctcagttcacgtaacaacagtgtctagaggaacatgcatagccctcagttcacgtaacaacagtgtctagaggaacatgcatagccctcagttcacataacagcagtgtctagaggaacatgtatagccctcagttcacgtaacaacagtgtctagaggaacatgcatagccctcagttcatgtaacaacagtgtctagaggaacatgcatagccctcagttcacataacagcagtgctagaggaacatgcatagccctcagttcacataacaacagtgtctagaggaacatgcatagccctcagttcacataacagcagtgtctagaggaacatgcatagccctcagttcacataacaacagtgtctagaggaacatgcatagccctcagttcacataacaacagtgtctagaggaacatgcatagccctcagtttcacataacagcagcgtctagaggaacatgcatagccctcagttcacgtaacaccagctctagaggaacatgcatagccctcagttcacgtaacagcagtgctagaggaacatgcatagccctcagttcacgtaacaacagtgtctagaggaacatgcatagccctcagttcacataacagcagcgtctagaggaacatgcatagccctcagttcacataacaacagtgtctggaggaacatgcatagccctcagttcacataacaacagtgtctagaggaacatgcatagccctcagttcacataacaacagcgtctagaggaacatgcatagccctcagttcacgtaacaacagtgtctagaggaacatgcatagccctcagttcacataacaacagtgtctagaggaacatgcatagccctcagttcacataacaacagtgtctagaggaacatgcatagccctcagttcacataacagcagcgtatagaggaacatgcatagccctcagttcgcgtaacaacagtgtctagagcaacatgcatagccctcagttcaaataacagtgtctagaggaacatgcatagccctcagttcacataacaacagtgtctagaggaacatgcatagccctcagttcacataacaacagcatctagaggaacatgcatagccctcagttcacgtaacaacagtgtctagaggaacatgcatagccctcagttcacgtaacagcagtgtctagaggaacatgcatagccctcagttcacgtaacaacagtgtttagaggaacatgcatagccctcagttcacgtaacaacagtgtctagaggaacatgcatagccctcagttcacgtaacagcagtgtctagaggaacatgtatagccctcagttcacgtaacaacagtgtatagaggaacatgcatagccctcagttcatgtaacaacagtgtctgaaggaacatgcatagccctcagttcacataacagcagtgttagaggaacatgcatagccctcagttcaaataacaacagtgtttagaggaacatgcatagccctcagttcacaataacaacagtgtctagaggaacatgcatagccctcagttcacataacagcagcgtctagaggaacaagcatagccctcagttcacgtaacaacagtgtctagagcaacatgcatagccctcagttcacataacagtgtctagaggaacatgcatagccctcagttcacataacaacagtgtctagaggaacatgcatagccctcagttcacataacaacagcgtctagaggaacatgcatagccctcagttcacgtaacaacagtgtctagaggaacatgcatagccctcagttcacgtaacagcagtgtctagaggaacatgcatagccctcagttcacgtaacaacagtgtctagaggaacatgtatagccctcagttcacgtaacaacagtgtctagaggaacatgcatagccctcagttcaggaacagcagtgtctagaggaacatgcataaccctcagttcacgtaacaacagtgtctagaggaacatgcatagccctcagttcacgtaacaacagtgtctagaggaacatgcatagccctcagttcacgtaacagcagtgtctagaggaacatgtatagccctcagttcacgtaacaacagtgtctagaggaacatgcatagccctcagttcatgtaacaacagtgtctagaggaacatgcatagccctcagttcacataacagcagtgctagaggaacatgcatagccctcagttcacataacaacagtgtctagaggaacatgcatagccctcagttcacataacagcagtgtctagaggaacatgcatagccctcagttcacataacagcagtgtctagaggaacatgcatagccctcagttcacataacaacagtgtctagaggaacatgcatagccctcagttcacataacagcagcatctagaggaacatgcatagccctcagttcacgtaacaacagcatctagaggaacatgcatagccctcagttcacataacagtgtctagaggaacatgcatagccctcagttcacataacaacagtgtctagaggaacatgcatagccctcagttcacataacaacagcgtctagaggaacatgcatagccctcagttcacgtaacagcagcatctagaggaacatgcatagccctcagttcacgtaacaacagtgtctagagcaacatgcatagccctcagttcacataacagtgtctagaggaacatgcatagccctcagttcacataacaacagcgtctagaggaacatgcatagccctcagttcacataacaacagcgtctagaggaacatgcatagccctcagttcacgtaacaacagtgtctagaggaacatgcatagccctcagttcacgtaacagcagtatctagaggaacatgcatagccctcagttcacgtaacaacagtgtctagaggaacatgcatagccctcagttcacgtaacaacagtgtctagaggaacatgcatagccctcagttcacataacagcagtgtctagaggaacatgtatagccctcagttcacgtaacaacagtgtctagaggaacatgcatagccctcagttcatgtaacaacagtgtctagaggaacatgcatagccctcagttcacataacagcagtgctagaggaacatgcatagccctcagttcacataacaacagtgtctagaggaacatgcatagccctcagttcacataacagcagtgtctagaggaacatgcatagccctcagttcacataacaacagtgtctagaggaacatgcatagccctcagttcacataacaacagtgtctagaggaacatgcatagccctcagttcacataacagcagcatctagaggaacatgcatagccctcagttcacgtaacaacagcatctagaggaacatgcatagccctcagttcacataacagtgtctagaggaacatgcatagccctcagttcacataacaacagtgtctagaggaacatgcatagccctcagttcacataacaacagcgtctagaggaacatgcatagccctcagttcacgtaacaacagtgtctagaggaacatgcatagccctcagttcacataatagcagtgtctagaggaacatgtatagccctcagttcacataacaacagtgtctagaggaacatgcatagccctcacttcacataacaacagtgtctagaggaacatgcataaccctgagttcacataacagtgtctagaggaacatgcatagccctcagttcacataacaacagtgtctagaggaacatgcatagccctcagttcacataacaacagtgtctggaggaacatgcatagccctcagttcacgtaacagcagtgctagaggaacatgcatagccctcagttcacgtaacaacagtgtctagaggaacatgcatagccctcagttcacataacagcagcgtctagaggaacatgcatagccctcagttcacataacaacagtgtctggaggaacatgcatagccctcagttcacataacaacagtgtctagaggaacatgcatagccctcagttcacataacagcagcgtctagaggaacatgcatagccctcagttcacgtaacaacagtgtctagagcaacatgcatagccctcagttcacataacaacagtgtctagaggaacatgcatagccctcagttcacataacaacagtgtctagaggaacatgcatagccctcagttcacataacaacagcgtctagaggaacatgcatagccctcagttcacgtaacaacagtgtctagaggaacacgcatagccctcagttcacataacagcagtgtctagaggaacatgtatagccctcagttcacgtaacaacagtgtctagaggaacatgcatagccctcagttcacgtaacaagtgtctagaggaaggcaccacgggaggagcatccctgtgagtggaggaagggcctggagcggtttggtcagcttggtctgttttcctcacctctcaggttcagcttaggcctcacctcccctgggaagcttctctgacacccacgcccaccacagtcttggttgggtgccctgtccccagatcctgtggctttttgttcacctgtggctttgcttaaatggtactgaattgtaattgcattgtcagactcctctcttccccactggaatttgaactccagggacagcgctattttcttctgttccatgttcctcatattcgacacgtagaaaacaggtggttagggcccagcgtggtggtttacaccggtaatcccagtactttgggaggctgagacgggtgggtcacttgaggccaggagttcaagaccagcctggccaacatcatgaagccccgtctctatgaaaaatacaaaagttagccgggtgtggtggtgggtgcctgtaatcccagccacgtgggaggctgaggcaaaagaattgtgtgaacccgggaggtggaggttgcagtgagccgagatcacgccactgcactccagcctgggcaacagagtgagtgggactccatctaaaaaaaaaaaggcacttagtaaacaaacaattattgaagaaaacataaccagatggcctctctgaggattctttcaactcaagcatctccctttgaacaggggaaagcaagatcaccattacagccccaggagtgttcagggctgggggatgtcctaggacagagggtccaactggtgatacatctgcccagagggcttcctcgccagcacagctgtccccctcctgaacggctgggccctgcccacagtgcccgcccaggagcatcctgcgtgcctgtttcccacccgcccctgggaggcttgctgcctccccgttgccccagctgtgcagacgtggccttgtgcccagtcgagtcaacagtcaacactcagtgagccccactggctgtgctgcctggggtgtgccgggtgcctcatgtatatccctgtccagtggaggaagcagacacgccccttgctgaccacagagtgtggtacatgtgagtcactggagaggcacaggtgccgtcctctgagtcacagaagaagcagtgatttgttttttgttttttgtttttttttgagatggagtctcactttgtcactgtcgcccaggctggagtgcagtggcacaatctcggctcactgcaacctccacctcccgggttcaagcaattcttctacctcagcctcctgagtagctgggaataaaggcgtccgccaccacgcctggctaattttttgtatttttagtagagacggggtttcaccgtgttagccaggctggtctcaaactcctgacctcatgatccacccgccccggcctcccaaagtgctgggatgacaggtgtgagccaccgtgctcagccttgttctcttgataataattttttaaattttcatgttttttctaatccccaatataatactggctggttttaatgagaaatgctcgtagtaccagcatgtacagggtaaagctggtcgccactcacctcccgctgctgacagtttgaggtgtattcttctgaactcttctttgcttatgctggtgtgcgcccgcgtgtccaatgagactagactacacgtgctgttttgcaacttcagcattttactccacagtgggtctttgagccctttggatgtatcagattctttttctttctttttgaggtagagtctcgctctgtcacccaggctggagtgcactggtgagatttgggctcactggaacttccacctcccgggttcaagcgattctcgtgcctcagcctcccgagtagctgggattacaggtgcccgccaccacgcccggtagtttttgcatttttagtagagacggggtttcaccacgttggccagggtggtctcgaactcctgacctcaaacgatccgcccacctcggcctcccaaagtgctgggattacaggcgtgagccaccgcgcctggcagtatcagattctttttaacaactgcctcctgctctgtcgcttggctgcatacaaatgtttttgggtgtttggattgtctctgattcttcgctcttagcaggcaagtcaacagtaaacatcactgcgcaggtgcctctgcagtaggttccctccaagtgggatgggcagggcagggtgagtgtgcgcttaattgacaggcttttacctctgaaaaagctgtgactggtggcattccccctgcggtgtgtgagggtgactgtcccccacagtgtcacaacactggctgtgaacattctttacaattttgccagtccagtgggttaaaaagaacaaaacaccatagaggtgaattctaactgaggagcttgaggatggccttgggagctgagacttgaagcataatggtggttaataaaagggagggggtcctttacgaaacagacagaaacttggaacattgagggagcaggctctgcccgcagaggatgaatgtctggtgagagggggaggctgagccgacgggacctggtgggttgtctgccgggcagggaggctggaaccctgccatgggggccttggtgccaggctagcaggtggggcttcaggctgaaaggtgtctgaggtttctttaagcaggtgtctctgttgtacccaggatttaatgtgtagaggcagcagagtgacagtacagagaggttaatactactgtaatatttgtattatttagggttctcaagagaaggaggcatagcaccccgcccagggccacgtggagaggtgccagctttgaacaggaggcaggaatggaaagaaagtgtggccacagcttttctgtggagaaacagggcagggaaagggcttggcaccagctggcttccgttatgtcggcagccctgggctagaggagtggtctctggtgacctggtccctggccctgggtgacgtggggcagaggagatgctggcttggcgagtgagcgtcgggtagagaaggtggttggggacatgggctctggatcagtgggtgtgtgtatgaaagctgtgctcatagggcatcactgacaggcttaggaattagtgagccctgtgggggagcagtttctcacccagctacccgcctctcctgccacaagatgtcaaaacatcacgaaatacggaaaatgtaaagagcatgttaacacacagtggagtgtcgtgcttagtgctgctcgtgagaaaggcccgagtgtgaggggaaccctctgtgtccccatctcctgcagaaagccaacaaaggccagagccgggccatcgagcgcctgaagaagaagatgtttgagaatgagttcctgctgctgctcaactcccccacaatcccgttcaggatccacaatcggaatggaaaggtcaggatgggtgggggtgggaccaagacagccccttccttagtccagagcagcccactctgtggctcctggccctgacctgtatgaaccggaaactcaggccccctcttcctgaggaggctgccatggctccagctgttgactcgctctcccctctcgtgtggaatgagtgccctctgctggccgtccctggcacagccgctcctgtcaccttggcttcccaggaaggagctcccccttcacccacccacccccagctgcctcctcctgcaaggtcagctgtgcctggataaggaggagctttgggccgggcacagtggctcatgcctgtcatcccagcactttgggaggctgaggcaggcgaatcacctgaggtcaagagtttgagaccagcctggccaacatggcaaaactctgtctctactaaaaacacaaaaattagccgggcgtggtggtgggcacctgtaatcccagctactcaggaggctgaggcaggagattggcgtgaacccgggaggtggaggttgcagtgagccgagattttgccattgcactccagcctgggcaacaagagcgagactctgtctcaaaaaaaaaaaaaaaaaaaaaagataaaaggagctttgttggggtccccaggatctgggagtacgctttgcctgactgtggtcacccactttattcttatctcctctcttcagagttacctgttcctactgtcctcggactacgagaggtcagagtggagagaagcaattcagaaactacagaagaagggtaaattcctgcctcttccacgctccccaatgatgtccgtggcattgatgggccttttgtttttctaagcgtttcatgtccagtatcacgtctttggccctcgcagtcaccctcagaggtgccagggtgagcgtttaaggatgttacggattaattgagacccaaagaatctaactgattggctgaaagacatgatgatttagtcctgggactggacccagagcccagcctgggctttctctctctctctacctctctctctctctcacacacacacacacagagacacacacacacacatacacagaggctgggtacggtggcttacgcctgtaatcccagtcaggagtttgagatcagcctgggcaacgtggtgaaaccccgtctctactaaaaacacaaaaattagccaggtgtggtggtgggcacctgtaatcccagctactcaggaggctgaagcaggagaatcccttgaacctgagaggcggaggttgcagtgagctgagatcacagcactgcactccagcctgggcgacagagtgagactccgtttaaaaaaaaaacgaaaacaaaacgcatacaccacacacacacacacacacacacacacacacacacacacacctcttcagttagattctcctactctgacccctctcacagcatctacaccagtcctgctgtgtccacaaatccttccccctccctcgcaaggaccaagtctgccccagggattaagccgtcttcctgcagcagcccccagggaagagcagccggtcctggtggaccagtgcccacgctcccttctctctcggctctccctccagatctccaggcctttgtcctgagctcagtggagctccaggtgctcacaggatcctgtttcaagcttaggactgtacacaacattcctgtcaccagcaataaagacggtaagctcgggaaccacaggtggcccaaccggcaggtcccagccctcagagcgtggccggcttcccgtaaggactcagacagacatgtggctgtaaatggctgatccctgctcggctgtgctgagactgttgagtggccaggacacagcttgggtaggggtgactgtctactgagttcccagatgaccccagcttttccttgggcccctctgtctggcttgggagaactggcaccctggtgcactgagattgtgctgttaatatattcatgagagagcagacccggtagataaaatggtgtatgggaaatgaggctggaagtttccagggaccagctcttgaaaggccttgaatcccaagcaagggagtttggaattcatgctgtaagcccgggagtctgggggggttttgagcagtggggagctgtgatcagggctgggaactgaccggagtgggtgtattctagctgcctgtgtgctgggaaagggtccactttgtgaacggggtcctgaaggcaagctttcctcgacataaatcattagcagaatgatttatcatattggtcagttttcagtgccaggataggcaggatttggagggagagacagtacccatggggaatggtactaagtccctgggccaggatggtgggtgtgctggacccccccaggctgagtggaggagagaaggaccccctagccctaccccgggcagctcacatacaaggccgccgtggccttcggaaactttttcatctggccaccaggtggtgatgttggaccaagactcagctgagtctcataccccgtctgcctcccgccggcctggggtggaggctgaggggatccgctgaccaccctctgccctgggggcttttctctcttgcagacgatgagtctccaggactctatggcttccttcatgtcatcgtccactctgccaagggatttaagcaatcagccagtaagtgccctggccaggacgaggttgggtgggccattgtggattctgcactgctctgcccaggatggggccctgccagcacgcctttagacatggggcattcccctggaggccagaaaccagctcctcttggcagggaggtcacccctggcctttgtctccaaagtcctctttctcaagccctccctgaagctgtctgaaacctaggggccgggcgcggtggctcacgcctgtaatcccagcactttgggaggcccaggcgggcggatcacgaggtcaggagttcgagaccatccgggccaacatggtgaaaccccgtctctactaaaaatactaaaattagcgtgggcatggcggtggacgcctgtagtcccagctacttgggaggctgaggccagagaatcccttgaacccgggaggcggaggttgctgtgagctgagatcatggcattgcactccaccctgggcgacagagcgagaatccgtctcaaaaaaaaaaaaaagaaaccgagtgcgacaaacacatggactccaacttcatatctgagggcgacaaacacgtggactccaacttcatatctgcccatgacaagctgtgtgaccttgggcaagtttcttaacctctctgggcctccactaaaaggcagtcacgcttgtgaattttgacccgagagcaggctgggatatgatcgtgtgtgtgcaacgctggtgtgctgccacgctcatcgctttttctccccttcccccttgtgggttcctcatactaaatctgtttttagtgtctcacaaagtaggattgcactttttaatttttaaaaaatttttttttagagacaggttctccccatgttggccaggctggtcttgaactcctgggctcaagccatcctcccacctcagcctcccaaagtgctgagattacaggcgtgagctgctgcgcccggcctggttgcgctttttatctacctgttatccacacgggaatctgtgagtcagttagacagctaatagtttctacccatttgccagaggaggtaaccgagtcacagagaggagaaaagacttaacatcacagaggatcagaaaccctgactctctccctctccacctgcccctcccactccctgctcttcactggcaggtggggtctgccctcacccctccctgcagcgccccacacagaggtgactccccgggccgttagagcagcctttcccaggaagcctccctgagttcctgggggcaaactggcctcccttctttgtcccttctttgtgcccacatcccctgaggttccttgtgcccccatcccctcaggttccttgtgaccccatcccctcaggttccttgtgcccccatcccctcaggttccttgtgcccccatcccctcaggttctttgtgcccccgtcccctgaggttccttgtatccccatccctttgaggttccttgtgcccccatcccctgaggttccttgtgcccccatcctgctcagggcaagctggttatggcacctgtcatgctgttttgtcacttaacaatttgcgtctcccactgtgagttctctgagggcgggaaccaggtctcctttaccctgggatgcatgggagctcagaaatgtggaatgaagtcgttaatttacacagcacctaccgtgcacctggagaaggtgagaacatggctggcgtgtggacgtactcacatgtgcaaagcctgtggcgtgttcagagcctctcagtctcacggtccgctctgagcctccggcatcccgccgaggtcacggaaaccatccctgttttacacacgaggacgccgaggctcggaggggctcaaggttccttcctggagtcacacagtagcaggtggtgcagcagaatccacgtcttccggcaccagagccggagctctaaccttttgggcacttctcgatgtctggccgggaacaccacacggtccctcaggctgcttgttaccgtggaagcttcctgaaccctctccagacccatagacctcccttcttgggggctgccgctgaggagcttctggctagtgagctctgaagcactgtcccacccatgtctggaccaggcgccaccactccatgtccccagatgccgcccctccctctcctgcttcccgttggccgggaggtcctcgcctcagggagccgacccgtggcctcccagcctgggcgggtgtcagagccggctgagctgctccaaaatctctctttacccccagattatcctcactcccttcgccaccgccacccctgacccactcatatgtctgttctcactcagaggtgaggccctgtgtcttcagccatggtaaactcaggacctctggacaggcaggcccagggtgtaggcaccatgacttttcctgctgtgcagacaggaacctggggagagaagggaggtgatctgtgcagagctggggtgtggacccagatggtctgactccggaaccctcgctctgaccctgtgagccgtccccagctccttccggaaccctcgctctgaccctgtgagccctcccccagccccttctcgaaccctccctctgaccctgtgaaccctcccccagacccttccggaaccctccctctgaccctgtgagccctcccccagacccttccggaaccctccctctgaccctgtgagccctcccccagccccttccggaaccctccctctgaccctgtgaaccctcccccagccccttccggaaccctccctctgaccctgtgaaccctcccccagacccttccggaaccctccctctgaccctgtgagccctcccccagacccttccggaaccctccctctgaccctgtgagccctcccccagccccttccggaaccctccctctgaccctgtgaaccctcccccagccccttccggaaccctccctctgaccctgtgaaccctcccccagccccttccggaaccctccctctgaccctgtgagccctcccccagccccttccggaaccctccctctgaccctgtgagccctccccagcccctcgaggaggggctcacaccgagatcaatccatgatgacagcacttcatggcccgtctcagacacacaggcccactccctggtctggcccaggctggggtgcccagggcctctgtgttgttcacctgcaaatccccagccccgttctgtgtgttctgaggcccacctgggtcttctttctgttgctccagctggaggcttcttggggtagctgcactgtcctttctgcaggaaagctggtttttttgttttttttttttttgagaaagagtcacttggtcgcccaggctggagtgcagtggtgccatctcagctcactgcaacttccacaccccaggttcaagcgattgtcctgcctcagcctcccgagtagctgggactacaggcatgtgccaccacgccgggctcacttttgtatttttagtagagatggggtttcaccatgttggtcaggctggtctcaaactcctgacctcaggtgatctgcccaccttggcctcccaaagtgctgggatttacaggcgtgagccaccttgcccggccaggaaagctgttctgatggagaatggcccagctgggcagctgcaggggctaagtggagtaagccacctgcactgtatgcccgcactgtgacctctgacgttgtttcacgctgcagagggttggccatagtgtcccaaaggcacctcccacaccacctctggtaccctgggaacaacctcggcatctccctggaggtgggaggactgctggggtccgagcccagggcgggtgtgggtttgcagagggcctggggtccgtgccggtgctgtggcctcagcagttgggtcccaaggtagattttcagcctgaaggccagggtggaagatggaaatgccggggaaagcccccggccctgccctcccgccccagccctccactgccttgttacctggagcgcttggtggtggtgggagcctcgttcaccgtgtgccagctgggttcccagccctgttcttggtactgcgggtacaccggcaggcaggaaaacccaggcttctctccacatggtgtttacgtcgtggggggagagagactagggacgcacgagtagagaagatccctttggtttatgttaagtgcagcggaggaaaccacagcaccctgggcttggggatgtgggcgttgttggtcgtcaccgcggcaggggatgctccgagcattcaggacccagaggcagggctgctaaacgcctcccaccccaaatgccgctgttgaggcctgggcacccatgttacggggagaggtggctccagggcggtcagtgaagagtttgtggtgtcgtctccatggtgaggaagatgtggagacggaacagtcaagggccctttagagggaggaggaggccagagtgtggggagggccgaggtgggaagggcagagtgtggggagggccgaggtgggaagggcagagtgtggggagggctgaggtaggaagggcagagtgtggggtgagccgaggtggggagggctgagcccctaagaagggggcaggggagaagccagatggtcccgggcttcagggaggagagagccaagatgccatccgtggggacgttggaaaggacagatgcgatgtccccctccatcctgagtgccgccccagctgccccaccctggccccactcactcagtatctccgtctgtccttcccccacagacctgtactgtaccctggaggtggattccttcggctattttgtcagcaaagccaaaaccagggtgttccgggacacagcggagcccaagtgggatgaggtgagtggcaggggctggcatctctgtggggaccccaccaccccgtgctcgtggcttgtctgctggggacggccagcccattggttggaccagctatgtctgcacccccctttctgctccctgctcctctggcttctgatcgcggtgtgtgtctgggtgtcagaccctgtggtgtcagctcaggcccccagactccaggggtgatgggaggcctctgggagctccagaaaatctgacgtgtccttcgtgggccgtgcttactccctcctccttgcaaagctgaggcacgcacctgccggaaagccaggcctcccagcttcggaggttcagggccctttgtcccatctttccccaggagtttgagatcgagctggagggctcccagtccctgaggatcctgtgctatgagaagtgctatgacaagaccaaggtcaacaaggacaacaatgagatcgtggacaagatcatgggcaaaggacagatccaggtgaggccagggcgccggggcgaggctgagggagcctccaggaggtggttccagttgaaaaggaattctggtcaaggagcctgctctttcgtgattttggttccaagctggttggaggaaagttcccaggaggtggttctcccctccctgctagaggtggctgcctgttgtggccccggaagcccaggcgtgtgcgtggctcctcaggtgggtcatctgcgcttctgcaagatggaaacaaccagctttgttttcacacgccagctttagtctatgggtggttgtttcccggaacgccatgttgagaaggactcagaggctgcgtcggtgaacgggagggaggaatgctgtgtgtgaggagccgtgtctgccattgacgggggaccggagttaggcacacggaccaggcgtttgctcttctgcccgaaagacttagggtcctgctggttggcttggggggaggggggtctctgacttgttgttagggtggccggaccttactcagctgcgttgggagtctgtggcttcgggtggggactctgggtgttagtagaggctgcacctcgggttaagggtatttatgcttctgggtgcggtggctcacgcctgtaatcccagcaccttgggaggccgaggtgggtggatcacgaggtcaggagttcgagaccagcctggccaacatggcgaaaccccatctctactaaaaatacaaaaattagcaggtcgtggtggcgggcgcctgtaatcccagctactcagtaggctgaggcaggagaatcgcttgaacccaggaggtagaggttgcagtgagctgagatcgcgcctgggtgatggagtcagaccgtgtctccaaaaaaataaaaataaataaaaacagcatttatgcctcaactgtgcttttggctccctataaacatatatagggaaaaggcctctgtgtgtgcagcctgtgtctctgaaacattctgccaattttgaagatggctgctattcaccaacctattaagagaagtaggcttgggagcgggaaaaggcgtgacgtggtggagccgctcacactcccgtctggtacctcgtgtggcctcgtgctgtgccgcaagtggtctggtttgggggtagattctgtgaccatgaaatgaagggagacggtaactgacccgtactgaggttgagcctcgggcgttgggcgtgctgagcttcttgacagtggccgcagacgtgatccaggcacagctgggcgccgagcttcttgaccgtggccccggacgtgatccaggcgcagctgggcgccgagcttcttgaccgtggccccggacgtgatccaggcgcagctgggcgccgagcttcttgaccgtggccccggaggtgatccaggcggcagctgggcgccgagcttcttgaccgtggccccggacgtgatccaggcgcagctgggcgccgagcttcttgaccgtggccccggacgtgatccaggcgcagctgggcgccgagcttcttgaccgtggcccaagaggtgatccaggcgcaggctgcgatggctccgtctacaacagggagctgaacgatgctttttagcaggaagcatttgttctctgatgcattgtcatggccaccgagtttggtatctggctcttacctgcaggtccttggtagcattgcccctggggagctgtgtgggtctcccactcgctgccccatctcaggctccagtgtttgaaccaggggccccacgtggaggggcctggcctctgccgcatacgccccgtgttcctaaacacgtctctttccgatgctgtggggtctgcaccctgcttctcagtactcgtcactagggagacagggctgccaggcaactgccagccagtccttcgtgatttaggaaatgggctctagagattcagtccctgggacctgctctctgtggggataaggggagggagccccatctccctgtccctgggctgggctagagggacaggcacggaagggttctgggctggcctgtgcagccccaggagacgcccaggcaagagacgagtggtcgccacgccacactccctgggccactggtggctgtggaatagaagagttacaaggatgtgccgggcagccagccccgtgggcacggtgggccccagcccctcgagaactcagctcccaaggcccgagggcacattcccccacctggacttcagccccattgcttccctccttctcactcagctgcacaagccccgggggaaacacaccatcagtcactgcaagcctcttggagacaggagcagatggaggcagtgggggagggaggaagccaggttatgtttggcaaagcagaaggcagagtctggtaaggaaaatgtttctgtgtttaagcttcgaggaatgttaaatgcctgggagttgatattaaaagaaatataaaccttcctgctgccagctgacctgggcctgtgagcggacagttcagagccagagtcccctgcaggcctttgaagtcccccagcactcagcatgccaaggcccggccctggccctccgctgcagaaccatctcaccagcctgcctttggtgggggaggcatgccccaggggcgggctgtggcttagaaagtctcgccccgtgactgccctcagagccaccgtggatggccaggctgggtgacgagtccacacggagctgttcccacgaacccgggccccacggagccacggaacggtctgtccccacagcttgtctctgccttcactccggccacacatctaaggaagggagctggcactagcctctggaatgcagtctttctgcccgccagcaggcgctgaggacatagtcggaggtggctttgagatagggcccagccctcggggatattcagggggcctgtaggaaaggcaggaggaggagggcagtctctgaggcccccacttctctctaagccccctcccagcagcccatccagagaaagcaaggggccctacggcctaagcgcaggcatttgctgctgtgatgaggcccccactctgggtcgcctgatggggcagtggggcaggagtctcagcggcggggtggggtgggggaagcatttagtgacagacagacggcagcatgcgtcaccaatgtgtgtccagcacttgtgctcctggaggccgcttcccaaatgccatctcctcgtgtgatccttgtcgtgatcctccagggagaatgacagtccctcctccccatcttacagatgaggacactggggtactgaggttaagtaccttggccaaggcatctctgcgtatggtatgtgggaaaggccatgttccctcctctgtgccatgtccccacgtctcaggcctttgtcaacgaatcccccagcccggacagagggccgtggcatggctaatggcctggagaagcagctgaggtgctgctttatggcataaggtgagcgtcctttgtcttggagtcctctgggcaggggacacttgtgcctggtgcccctgggaggaaggagaggagcacgtgcgggaaagagcaggaggccgaggtgggctgatcacgaggtcaggagttcgagaccagcctggccaacatggcaaaacccctttcctactaaaaatacaaaaattagccaggcgtggtggcacgcgcccataatcccagcactttgggaggccgaggcgggcggattacaaggtcgggagttcaagacccgcctggccaacatggcgaaaccctgtttctactaaaaatacaagaattagctgggtgtggggcccacgcctgtaatcccagcactttgggaggccgaggcgggcggattaggaggtcgggagtttgagactcgcctggccaacatggccgtctctactagaaatataaaaattagccaggggtggtcgtgcgtgcctgtaatcccagcacttcgggaggccagggcggggggatcacctgaggtcaggagttcgaaaccagcctggtcaacgtggtgaaaccctgtgtctactaaaaaaacaaaaattagccaggcgtgatggtgggcacctgtaatcccagctacttgggaggctgagggaggagaatcacttgaacctgggaggtggaggttgtagtgagctgagattgctccattgcactccagcctggacaagacagaatgagattctgtctggggaaaaaaaagaaaagaaaacagcaggaggggtacttagcatgcgtctgtgaggtccccagcccaggagggggtcctggcctccagggacccactgtcagattggaaagacgagtatattggtccatgttctccagtgagaagaatgctagatgtcagccacaatagcctacacacataagcgagcccaggacgagcccagcacggtgctaaatgcttccatctgctgtctcaggagatcttcccaggaccctgtgggagaggaatatcatcacagctagaaagatgaggaagctggggctaaggagcccggccaaggccatgtgcccaggagtgggccagggcgggcagctggctgcagagcccatttctagatgtcctgctgcctcctgctataagaagacggaagattgtcctgctgtaagaagacggaagattgtcctgctgtaagaagacggaagattgtcctgctgtaagaagacggaagattgtcctgctgtaagaagatggaagattgtcctgctataataagatggaagattgtcccgcaggaattcagaggcagaaaggtcaccatgggctggaattagggaggcttcaaggaggaggtggaacgagagcgatttggaagccctgggttttttaattccaaaagcaatgtttgtatgagaaagaaaattgcagtagaagcaaagagacttgaaacctaatcagaaaccatccttcctccggctcctccgaagcagccagtttattctgtgccttttcccttcttgaggtatacacatttttatgtagatttaatcagggcctgttttgtctgtttttctgttttcatggattattataaacctccttttctctagagctgtatggagtcttcttaagcacctttttggatactttgttaaaagtactttatattctttgtagaaatcttggtatagagcggccagcgcaattgctatgctaaggctctgtgttattccagcaaggtgcgcaggctccgcttccgcagaagggagtagggtgggagttccagaggacagacccgcctggcagggaggcacgaatgtgaagggagggtcccaggaaagtcaggagcctcagcaggggtggcggggagctgcaagcaaggccagtagaaggaatgaataaaaggaggggattcctgggggtttggccggaagaggtatttttttttttttgagatggggtcttgctgtgctgcccaggctggagggcaatggcgcaatctcggctcactgcaacctctgcctcccaggttcacgccattctcctgtcccagcctcccgagtagctgggattacaggcgcccaccaccatgcccagctgatttttattagtagtagtagagacagggtttcaccatgttgaccaggctggtctcaaactcctgagctcaggtgatctgcccacctcagcctcccaaagtgctgggattacaggcgtgagccacggcacccggcctggaataaatcttagagggcgtttaatccaatcctgttttccggagagaaggaaatggacaccagcaagggtgagcgaggcagctgcggtcacagagcttgttagtgggtgaacaagggccccagactcagggaccccatccaggtccgcttagctgggagcccccccctccaccggctcttgcccctgcccccggcgtagtctgccctggctcctggtcccaggggactccactgtgtttatcctactctatttccagccttgccgctccagctgcaacctacccgctagctgattagcatattcccagggtccggcccttcttggcgggctgggcctgaggagagcgctttcccttggggccccacagctcagcttctgccagcgtccccagactggagaagggcctgagaccaagaagctacttaaacctgaggggccctctgcaccccctgcccgccccccggccctgcgtcattccctcgctcaccgcaggctggggacagcccccaccccacagtccacctctgctccctgtgcctgggaggcagctccacttccccacgtgcctgccagggcagcccctccctgggcacagcagcgctgaagaccctgtggtgggaggggcaggttccaggccaggaagggagtgtgagccaccgcgtccggcctttattctttttaaagaaaaaatagtggtagaagccaggcatagtagctcacgtggtgtagctgtggactacttgggaggctaaggaggctagagtgagctaaggattgcgctactgtactccagcctgggtgacagagcaagagtctatctccactgaaaaaaataaaaaataaaagattgtagtgaaatatacataacataaagttaccattttaataaattttaggggccgggcgcggtggctcacgcctgtaatcccagcactttgggaggccgaggtagatggatcacctgaggtcaggagttcaagaccagcctggccaacatggtgagaccccatctctacaaagattaaaaaaaattagccgggcgtggtggtgcacgcctgtagtcccagctattcgggacactgaggctggagaattgcttgaacctgggaggcagaggttgcagtgagccaagatcatgccactgcactccagcctgggcaatagagtgagactccatctcaaaaaataataatttttgggtgcacagctccgtggccataggtggatttggtgctgtgcagccgttgccagtgtgcatatccagaacttgttggccctccccagccgaaaccccatccccattaaatcataactccccactcctgcacccttagcctccagtaaccacctgcctgctttctgtctgtacgaatttgtccagtctgggaaccttacgtaggtggaatcagacagcatttgtcctcctcatgtccttgagcttcacccatatgccgttgtgtgtctgaatttcctccctttctgaggctggatacaatttccctggatgtagatgccacgtctctttatctgcccgtccgtccgtggatgtaggtgccacgtctgtttatccgtctgtggatataggtgccacatctgtttatccatccatccgtccgtgaatgtaggtgccatgtctgtttatccatccatccatccgtggatgtaggtgccacgtctatttatccatccatctgtggatgtaggtgccacgtctgtttgtccttctgtctgtccgtggatgtaggtgccacgtctcttcgtccatccatccgtctgtggacgtaggtgccatgtctgtttacccatccatccgtccatggatgtaggtgccacatctgtttatccatccgtccgtggatgtaggtgccatatctgtttgtccacccacccgtggatgtagctgccacgtctgtttatccgcctgtccatctgtggatgtagctgccatgtctatttatccatccgtccgtggatgtaggtgccacgtctgtttatccatccgttcgtggatgtaggtgccacgtctgtttattcatccgtttgtggatgtagctgccacgtctgtttatccatccatccgcggatgtaggtgccacgtctgtttatccatccattcatggatgtaggtgccatgtctgtttatccgtccgtccgtggatgtaggtgccatgtctgtttatccgtctgtccgtccgtccatccgtgcacatttgggttgtttccacccaaaacgctcttgcctttcgttgagaaaaagaaccttgtccctgaggatggagacagcacagcctccttctctccagacccaagctctgtcccccacctgcctcccagctgtaatagatgagcaggacccgtgaccctagggcatgactggtcactattagtctcctgtagttgaagcacacagttgggccccctgcctcggccttctctccccctcccggccaagtgtccctgccccttgaccccttcacccttcttcctgggtcagctctttcctcccctggtcagtggtttaggtgcatcgaatgcagacgcagtcaccctgaggccgcgggaacaacctctggtcccttgacttcttggcatctcagtttcttcttttatttatttacttatttatatttatttgagatggagtctctctctgtcgcccaggctgagtgtaatggcgcagtcttggctcactgcaacctccgtctcccgggttcaagtgattctcctgtctcagtctcctggttagctgggattaaaggcgcccgccaccatgcccagctaattttcgtatttttagtagagacggggttttgccatgttggccaggctggtctcgaactcctgaccttgtgatccacccgcctcagcctcccaaagtgctgggatgacaggcgtgagccaccgcacccggccaagtttctttattgattcagtgggggtaactattcctaccccaccttcagcactggcttaaaggatctcacatacctggaagagccagtcggtgctgtgacgtgtgcgtccacgctttcacctgttcactcacttgtttctgtttacgatacatcctctgaatggcaggccctgggctgtgggtacaaagaatgaccaggacctcaccgtctggtaaagaaaacaagagaacttaggccaggcacggtggttcatgcctgtaatcccagcactttaggaggccgaggcgggcggatcatgaggtcaggagttcgagaccagcctggccaacatggtgaaacgccgtctctactaaaaatagaaaaatcagccgggcgtgatggtgcgctcctgtaatcccagctactcgggaggctgaggcaggagaatggtgtgaaccaggacccaggaggtggaggttgcggtgagccgagattgcgccattacactccagcctgggctacagagcgagactctgtctcaaaaaaaggaaaacgagaacttggatcgttagccagtgttgccggggttttgaggccagacagatcttgcggggctgagtctagctttctccatcgttagttgggagaacagagcgagtatctttgcctctgagcctcagcttcctgacctgtcagatgggctgtaagaggactgaatgtgagggtccatgaaaccctggacccggggcctggcatggagtcagtacgtggtttgccctaagctggcgggttcaggcaccctgtcccccacccccttccagtggttctgggtgtcacttgtccagcagccccctcctaaaggctgtcacctataagtggtcccctgggtcggggcctttggctggccgaggcagcattattttcttaagctgatggggtcagactggctttgctgaaccaacctcatagcaggggcggggaagtcaaggctggggccctcaatgccggctggcccgaggtttccctgccatgacccagcacggcagctctgagcttggcctggtgtggtcggaaacaaggggcctttgtcagcggctggggagcagcttctggtttcaattactctggagagcacgaggaagcttgcagagaacgtggggccggagcccgccagggcaggagtcaagggctcccctgccccacttccctccctctgacccccaaggggtgtcttgtccccattcgaccctgcctgagggtcctgcgcgtgcgtcctgggggccctgggttgtgagcccagagccccttccagctccggccccctctcgttcttcatagtggtactgggacccctcccaggaagatgatcgacggccggtaacgtgggtcctcagtgcttccccgttccaggcctcacgcgtgggccacactgaccacagccgggcccctggccctgagggaggccttgattcaactgggaaggaacacaggcctttccctttggttccatctctcccgtccccaacccctgccctggcactcacagcccccatagctccctgtcgtgggacaccggagtgacctctccctggaagatcagcccgcgtcggcgcccgccaaggccaggagtgcatgtcaggccccgcctcggctcctggcttaggagttccgcctccctgctgcttgccaccctcacagctggcccacgtggggctcttccctctgccgccacccccacccctgtgccagttccccaggcacatagggaccgtggaggctgagccccaggcctggttctacttcctgctgactctccacttcctcccagggccccgtgactgcagccattgtcctgctctggccctgcccaccccagctgtttcgggcacatttgttctccagcccagactcccacctgctgtccctcttcaaggcaggtctagacgcctggttctccttggagagtgggcagcagagactgtcctgggtgggggaagtcgggggagggtccctcgagagtgcctgccctgccgtcgaaagcttttccaaacgtggggcacgaacctctctcgtcagccctgctcagctgcctccatcgcccaggtgttcctgattttgggagcctggactctgcccagtggattctgggcaggaagcatccagcaggaagcagatggaggtgtgagtcggctccccccgctcccctccacccctgggaagtgccgcctcagcaggcaggcttggcgcccgctccccctgacccgcctctgaagggtgggcaccatgcagagaagccggtccagacaggacctcaggagccgatgcagtcaggccctgagaacatccagcctcccgacagaccaaaaaaaggtgttctcagctctgggtgccgggctcccagactcagaggcacgggacctgggtttgatcttagccggccaacctcgggtgacccttcagagagtgtcctctcgggtccgtggcattcagcgaactcgccgaggcgaaagccgcagacatagattcctccccgtgagccgctaacctccctgctggcggaggctgctgcttcctcctaggaatccaaaggatcagctccagggttgtcccactttccgtgttttctgaaagcttcaagagaaggatgccacagaagggttgccagagaatttcttgagttagggctgaggctgcagatgaatgctgagcgggggtcacctttagggtgggctctgctggcctccctcaagcctgcggccaccgcagactcacagcagcccctcgtggccagccccgcccttgccgtggcctgggggcgtggacattggtggtgctgggcgagggtctaagccccagtgtagcctgtagctttgggctggggcagggagggatgggcacaccgtgttcacgccctcggaggcaagtgctgagctgccctggcttcaggaaagaccctagcgcggctggagacgcaagatgacccagacacacccgcctgacccactagacaggtgctgtcccctctcgaggctgccagggcgaacccacagccactgagcaaaagccctgagtttcccaaaggagggagagaagcagagacacgactggagctgcaggttcagcgtctgacccagaggtgtccttacaaagcccctaatctctcagacccccacgtcccccaccccgagggagagcgaggccttcgggagaactgcctctaggagctgctgggaacctaaggtttgagctgtagatgcctgaaaggagggcggggcgctgaggtgtgcctcagattctgcctgtggggcgtgggaattccggggagggacgtgagccccaaggcaggcgaggggtggtggaaaagcaggtgtgagccagtgggccccacgtcccctcttcagccagggcgcctgctctctctgcttctgcttttatccgacgaggtgggcagggagacgtcggcataaaatttcatttggaaaaaacggcaggggtgcgtcctcagcagaaaagaaatctcaccggagaccatgtgtctgttccgagctcctgatttgacagctgtggaaactgaacccagagaaaaacacagccgttgagtccacaggtccctggctcccagggctttgcttctggccaccatgagctcggagcttgggtggaagggaggtgttcgggaatccagaatgaagaaagagcagggaggctcggcgaccccatcccaccttcaggcctcagcccctcctgcctcaggctgcaatttatggctgtgctgggagacccggccacaccccctccttcccgggaggaggagcaggcaagcagcccaggggggctccagcggtagggacagcatactgaggggccacgccctgcccactctgtccctgggtgagttttgttctagataagcaagatgttcccaaaggctcaagtgcatttttcacccttttccatgaccaaatgtgctgtgagaatcgctagggtttgccagggacgggctgtcgggacacttctcctgcagcagacaagctcttgggctgtttcagcctctcctccgtacctagaaccaccgagcaccctggcgacaccagcctgacgtggccagagagaggctggaggtcaggcagagggaggctggagctgtgtgagaagcagcacgtactcgggactgccctatgagccggcacaggcctttggggagttgggaggacagcaggttaccttgggcaggcctaggtctgggccgtagagcaactgatttcatcctgactgccttcttccttacactgtgcccatcttcaaccttgagcccaccctggacccctctcccagccccacctggatggatgggtgggtgggtggatggatggatggatggatggaaggatgggtgggtgggtggatggatgggtggatggatggatggatgggtggatggatggaaggaaggaaggatggaaggaaggaaggatggaaggaaggaaagaaagaaacaaacatagctcctagggtctaatctgccattggctgctgggtgactcctgtccccaggctgaatgcaggctctgaacattgcaaatacccagaggtatccgatgggtggggagaaaaacctagagtgagtctcagtgtctcattctgggaagacatttggccttccagtccgcaggttttggttagggtcggtacaggaaatggtcagaacacacagtaagaatgcagtgaccacagagccaccgagttgggggacactcccgtccccactcccccacagctgtccccggaacgtgccatcctcccgcccaactcgcacgccctgtgtgggcgctgggcaccccgggctcccatgctcggcctgcttgtctctctctcatcctggagcctgcacctgtctttgggcaggagccactggcaggctctctgcagcccccaaagcctcgggtccgccctgctctcctccagcaccttcttgccccccagcctcgggtccgccctgctctcctccagcaccttcttgtcccccagctctggtcctctgatgcccagccggtgccctgatcctctggtgctgagagagggagtgttcttggcagacctgagccacatcccctcggtccccatcctcagctgggtgccaggctcctcctgggctctggactctctgggcggcctcttggggctctccccgccccaactggctcccaggctatccccactggggcgcctgtggccttggtctagctggctgctcagaaaccccctctcctggagtcatttgcgctagcggataggacgaggaatcggggttcaagtgtgggctgggggagaggagcgtcgttctggtgggaaaaaggaggtcactccaggaaagcggcagctgcatttctaggttctgaggcagaaccttcctcctggtgctcacaggctggaggatttgcctggaagccgtccccacccccagctgtcaccgaggcagccccactgcagcctttgcccctcccgctcgcacagggcaggatgtgaccttttttcctcgttgatgccgccactgaacaccttaacccgattttacctcagtcacagctgtgctgggtggcatgaccccctccctaggtgtaatgcggggtcccacccacgtctccccggggacagcccctctcactccccttgcagagagcctggggaggggctgagggaggatgggatggtccactaggaatgtttttaattccaaaggcagtgacatctgttcgtgggggccttaccaccaggctctgtttatccagccgggggagtcttgcaggtcgtctgaggagggctctggcaggtgtgggggatggaaggggtggggggagcaggtgtgggggatggaaggggtggggggagcaggtgtgggggatggaaggggtggggggagcaggtgggggtagaaagggtggggggagcaggtgtgggggatggaaggggtggggggagcaggtgtgggggatggaaggggtgggggaacaggtgtgggggatggaaggggtggggggagcaggtgtaggggatggaaggggtgggggagcaggtgtgggggatggaaggggtgggggagcaggtgtagggggtggaaggggtgggggggagcaggtttaggggatggaaggagtgagggaggaaggagagtggccccttcccaggtggttgggatagcctgagctgaacccagcagagatgaggaggggtccgtggtgggctgcagcgactagaattcagacttctgcttttgctggggacatctgtcttgcacagatcttcttccacccaagaccattgactccaggaagcaatgagtcgggcttgggggagagaaggcaagtctgcgctgtccccagaggaagcccccagtccatagggaggaagggaaagatgagcgtctcaggggaagactcccaactcggctacccatctgcgaaggcacttatgtcaccatggagaccagctggccatcgttcatccagtccgagcttgctttacctagacaagtattgagcctgtggtacctaagacagatgagtgccgggccttgggaacgggattcacacggcccccttctcccccacacccggcggcagggaggggcgtgcattctcgcagtctgcaccctgtggcctgggacccagcccgagggaaggggaccataggccagtgaggggccgattctgaagttaagtcacggcaccaggagcactgtggcgcaaacgtggagagcagttataatggcatcctaccagccagttacatgacagccattgcacgtttgctggagggaggtagagtaaagctgggacccagtgagggtggatggcctttccctacagccccgagggccccacgctgacccctctcctccaggaagccttccccagttgcctccagctggaaattgtatctctcgatgttcgtggcattttgtctgtcctgttctgaggccgtaatatgggattttgtgcgggttttgtccatctgggcgtggtgcctagtaggtgcacaagtgacccgtgccaaatgcacaaatgcttgtctgcctcctgttgatggacatctctgctttcttggctgcccctttgtcaagcactgacttttgattcgtctctgtgatgccttaacccccaccccagggtcgggcacgcagccaggccctcagtcactacctctagagtgacatgagtggggccaggtgcagtggttcatgcctgtaaacccagcactgtgggaggctgaggtcaggagtttgagaccagcctggccagcatggtgaaacctcgtctctgcgaaaaatacaaaaattagccgggcgtggtggtgggtgtgtgtagtcccatctactcaaggggctgaggcaggagagttgcttgagctggggaggcggaggctgcagtgagccaagattgcaccactgcactccagcctgggcaacagagcaagacactgcctcaaaaaaaaaaaaaaaaaaatgacatgagtgggaccaagcagtggggcctgaggagtgagcagagccttcctggaggagatggctttgtggctgtgtgaaggggctgtctgggtcctcctggagccctggaaggggcaggcgaaggaggggtggagaagggtgactgaggcctcagttaggggacacaggcatgttcctacctccgtccgtctctccacctccccctcaggcggtgctggtgaggctgttgtggctcagcccccacttagcagctcaggtttgaggaagttccgtgtgcaccgtccaggggtgcgtgtgacgtgtgagccaggaagaagtggagctggtctggccgcccctgcagggacagtgaagactgaggcccggttctagcccaggcaggacgccccaaggcccccctccaccagccaggtggaagatagtccagggccagatcctgccacactagggcatcacagtgagtgacaggggtgtgggctttggagttagccagacctccgtttgtgttccagcttgtcctggccttggacacgtagctcagcttgtcagagcccttcgtttcctcagaggtaaagcggggatgctggtactgacttcatacagttgggaggggtaagtgacttaatccatgatgcctggtccctgccagccttccacgaaggacagctctgactacggctgtctctgcagggaagccacctattcctcaaaaacaccaaggcctctgaggagaaatcccgacacctgcctggctggtgacgccggatgccgagggctcgtctctgggccccgacccacctgccttggggtcaaccaagaaatgtcctgacccagctctttttcctgaatccaaagcatcatccatgtttgagtaaggcacagtgcttgtgagcaccaagggctttggagggacctccccatcctcacttggcactgtgtaaccctggcaagaactggacctcctgaccccctgtcctcacctctctagaacagggcagtaacaccaacatgacaagaatgtgaggctcacatgcagtcgggcgtttgaaagacctggttcgcggttgccacggtgcaaatactggtttcctttctgtgccgtgctggggtctgcagaggtccgaggccccagacacccctgggttttgcatagttaaacatttgggattcagcctttctcttttctctgaataccgtactctaacttgcactgttaccttgagacgtaatttgtgtcctagtctctgcggttagaaagttcactaaataaattgaaggtcaagaacaagttcttctctctctcaaggcgcccagcacggacacgggtggttgcccgtggcgtcctctgcgcccagcacggacgcgggtggttgcccgtggcgtcctctgcgcccagcacggacgcgggtggttgcccgtggcgtcctctgcccctggcagcggaaaccttttttggtgaggtgcaaagggccatggttcaaagtgacccctcaagaggcatctctggctggacgtgtgacccgcgtcgtttcgggcttttgctcctgtccctgagcagatcagtgacccgattcccactgggattcccacactaggggtctcctttatccttacatttctcacctgaggaggcttctgagtgccggtccacaagggtctggccgggtcaccaagctggctctgaggaaggtgcctggggcagaagttgggggtggggaagtgcgaccccagggcagtcagagtcttttgcccggggaggagggcagctgtttgtggccaaaatgcagcccccgcctggcccccggcccctccgcttggcccctggagcagcccggtgggcaacacggggacccagcagggagggactggggtgtggggctggtgtaaactttattgcgagggagggcggcggggtcggggaggagcagcgcccttgccagggatgaaacccggggttggggcttggaggggcggccctgggcctgggaggcggcgctcagcctgggctgcagcctcgcggagggcggggaaggagggatgcggaggagggaggagggaggagggacgcggacggagggagggagggaggggagcgcggggagggagggagggagggaggcgagcgcggggaaagccggcgggactagggaactagcgggactggcagccgggactgagcgctccacaggcgccttctctccagcgccgcgtcccgtcccccccggcatgaccgacgtcctgccccagcccgactgcagcccgaaggcggggcgcgaacccctggcgctggaggagtcggggagcaagcgcccccccaacaccggcgcccggctctggggccgcgtgcgcaacaagctgctccgaaacaaggtgcccgcgggggctggaggttccggggggtgggggctcgggggcgctgcggggctcggggggctgcgggggctgcgggggctgatggggtcccgctcccgccccctccgtggagtcccgggacagagctggggtctgtgcgcgtccctctaagtggcttgaacttgatggcgaacgctggggccgcccccacccggaccctggcgctcgggcatctgcccctgcctcgggagaagggaggtttcttctcggcaggtggaccctgctttccactccgggagtgcaaacagcgcacggggagacgcctgcctctgggtctatgtcttgccgccctgttcagcctctacctgatccctgcatccagcgggccttgctggctgcccctttgctgaggggcgccgaccgcagcaccgtctgccgtgtgaggtttctctgtgcaggattgtggggaggggagatgctgccgggtctgggggctcgaggcttcccttcagggaccacccatctgactgtgggcccagtgcccgccgggcaccaggcgttccgtccatgtgccagggcagaccgccggtgcccctgcagccccagacctgagttgggattaaaatctgagatagaagccgactgtcctgcagctgggcaggctgcctcggggctggcttggggccctggcatcaggcacgtgaggaagagccagacccagcgcccagcgcacaggaagtgctcgataactctgcagatcaaatcaactgtccgagttagctgtctcagagtgccagtccggctggccagggctgggcccatccatcaagagagcaacaagggaggccttggccagtccgtggtggggatctgcagctcctcctgaggctcacaggacctctctgcaggctcttactgccagccggcattgaggctcctggcatcagccaggacgaagtgatcttgggctcactggcccctcgttttgtttcagctcctgccatggggcatacttgacctcccagaggtgacatcagccctggaaagtgctgggcagggcagcaacttgagctgtactgcactggcccctgtgtcaccttcagcctccctggggactgggctagcagagccctgctggccccagctgctgccagagcccctctgtgctgaggcagctgtctgtgcccggcagcgtggactcatcccctccccagcccctgctgaggccagcaggcaccagcccagagctcaccatccatccccaaacgtcagggttggcaagaaactgacctggcaggttccgggtccagcgccagccaaacagggcgcttccagtttacctgcccctttgaggaggtgcctggtgggcagggggcaacttttaaacctgaggtcccagactttcagttctttccctatgcatttgtggccggcagaactgagaagccccttcaagaattccttagctgggtttgcctctggcagtgcctggtggctccgtgtctgatggggatctctgggcaggggtggtggccaggcagacgccgggctattgagctgctgagcagttggcgtcagtgcagctcagggtggccccggccctgggctgctctgtgtgacgagcgattccatcccctaacgtgtgctgtgtgccacagtgtgtccgtgtcgtggacgcaggggtcagcgctgtggcggacggagggacgtctgccacagtgtgtccgtgtcgtggacgcaggggtcagcgctgtggtggacggagggacgtctgccacagtgtgtccgtgtcgtggacacgggtcagcgctgtggtggacggagggacgtctgccctgtgcttcccacctcactgtgcgcaggccagcgggtgagcagcagagtcaaagggccaggcctcttgctttctatcctcagccacattaacctggcattttcctgcaggagcttcacagttgggccgaggggctgggactaggcagtttcgtttcggtggggtaagggaagggtgcctggtactgcccagactggcaggagggattgcctcattaactcctcgttaactttgccctgagtgatgctgtgggtgcgagaaacaccggtggccctcctgcttccactgacctgaaggttcattaaaggctggaggcggggcgtgactcatccagggctgggattaaacaatctgttcagatggaaaggtctcatgatcagaactgagcctttaaatagtgcagggcctctggtttctgggggagaggaggcagggacactcacggaggatcctttgggtaccagcgggggtccctgtggttgggctgttcttgtcaccggaggagagttcaggggccaaagcctcattccagcccctgacttggcagtcagctttttgtgcgagtgtttagctgggagacacgtggcatctgggtttgtgggttcagccagggctctcggtattgaacttcgcgtttctacttttctttccttttccctgtttgtttttttttttttttgcctcaaatcacactcaagtagaccaggcccggtgccttcctctccctcccatccttccctcttctagattcttggttgagctttggatgggaaggggctgaattctagattctcgcttgagctttggaggggaaggggctgaaggaggaacccccccaccctgcccccgcagcatccccttgtgggagccgtgaggaggctaagagggcctgaagggaggccggtccagaagcatttgtctgtcggggaagttgaggcccttatagagcaaccaagtccaagacgctcctgacccagaccaggccagatgctggccggcggtggggactcaggctgagccggcagggtgtaaggagattgagtgcagcttcaggtgaccttgtctctgccctgaagcacagccatgtgggtctgagaatcccctacttccaaagagctcctcttaagctggacaccggcactgctgacccccacggtgagtcccgtgttctgtgatgggagctgctgcctttgcttcagagaggatcagaggtgttacctgaggaagggcggggtggagagcccctcttgggccattcggggaagcttcaggctcatgatggtcttagaagaaggtccctttcttggatcacctgatgtcaggagtccaagaccagcctggccaacatggagaagccccgtctcaactaacaatgcaaaaattagccaagtgtggtggctcacgcctgtcatcccagcactttgggaggcagaggcgggtggatcacctgaggtcaggcgttcgagaccagcctggccaacatggtgaaaccccgtgtctactaaaaatacaaaaaaaaaaaaaatagccgggcatggtggcgggcacctgtaatcccagctgctagggaggctgaggcaggagcatcgcttgaacctgggaggtggaggttgcagtgagccgagatcatgccactgcactccagcctgggcaacagagcgagactcggtcttggggtggggggaggaaagggtccctttctttgtcagcttgatcgccaccgcaggacaaccccacccctcacagagcctgtcgtttattccttcttgatggtaccaggtgtgcagaccacgtgcacaccccagaggttcactctaccactcacttggccatcgagggtacacaggtgctgggtacaagatacagatatgtcttgggctcgtctactttattttataatccagtctgggcgtcaggaaagatctcgcagccttctgcaatagaagtctggcctggcccggctgcccaccgcccttccttgtttcccggtgggaagaaagcttcatcgtgcgtcttctctgttcacacacacccccatagcgacccctcagccacagacaggggactacagtgctgcctcccccgagagctggaggcccctacaccagcccacctcttcctgggcctatgtgtgggtcctgactgcggccaggctggctgacaggttggcagtggggtcgggcgaccctccctcttttccacagcacttacccacctgccgagtgggcagacctcactgctggggcctcatgagtactctctgatctctctgccaggccagctcccaagaggcttgcttgagtccgcagagcgggaaccctggactctgagaatctgatgaaggttctggaggccactcagacacagagccaccccatgcacacactgtgtgcgacttcagagggggctgcagacatcaaggcgggaaccctgctctgagtgaacttggcaaggtgccgcttcttggtacctagggagggtagaagggcgctggtcctccccggcctccctgcaggccacagacggcttggccagccagcggtgctgggcgcggtgccccagcttttggatggctctggaccagggagaggagaacctgccaatcaagggggttcctcaaaggccaaagctgcctgagcccagtgttgctgtagtacccagaggcaatgaggccccagacattttggaaggagcccccaagcctgcaggtgtggctgggggagctgccccaggcattttggaaggagcccccaagcctgcaggtgtgagtctgggggagctgccccaggcattttggaaggagcccccaagcctgcaggtgtgagtctgggggagctgccccaggcattttggaagcgcccccaagcctgcaggtgtgagtctgggggagctgccaggtgttggccacagggcgctggtgctggagaggcctggccctctgctgagtggcctcgctcactgcccaggtggttgggaactggtcagcaggtgctgttctttgacctcgtttcccctgtgaactcatgctggggcaggaagatgtttgtgtcctgacggccccccagcaccttcgaggaacagacagtcccctgcgcctgtgacctgcctgccccaccctggggagaaacgcagcgtcagtcctgggtccagtgagccgtagacccttggccctccaggatgggccctggagaggcgggaggggcccgtggagctggtcctgggcttctgtagagaggccaggaggccccaggatccccacagagacttccccagtcccgcttcaagacagcggaaccagctcctgagccgaaatctggagggatctcctttctggaccgtgaccccagccggggctggtaccgatgaccggcacagccagagccgtgacatccacagcgcccttcccatccgatgcctggatgccgtggctgtgctcggggaggcctccggggtccccagcccctcaggctcatgtggcacaaggtgccagagaagacagggcgccaggccggtgggagtcaaggtttcccatttttctcgtctcagtctgctacttaactgctgtgtgcccgcgagtacatccctttgcctctctggttctctggtatcagctcaatgaaggagctgaacaggatgatctcctggaatccagttcatgtgatgatcttggccatgtctcaagattcctagtcctaaaccttaaaccctgagcaccctgggagagtctgtcacagggctgcacctgggccaatgccagccattcagtggacacgggagcagggggtttagtgggaacacagggcttcttgagccctgtcctgaagcagccccggcggggagccattgtcacctccttcccccatgccccagttggttcctctggcctgtgagtattgccggagcaccttccacgtgccaggcctgcaggaactagggacacagaggcgcccgagacagacgagaccctgtctgcaggaggagtccgtcaacaaatgagatccttgccggtcagatgagtgctgtgaaaaaaataaacacaactgggtaacgcagtagagagtgacggggggatgcctggcttgagaggatcacttttgaacgaagatttaaatgacaagaagaattcagccataaaaaacctgggggcagtgcattccaggccaaagaaccggcaaggtccacaccccgaggcaggtgtgctcagaggcagagggggacagtgtggggcgttacgtggggtcaggggacggcggccaggcgacgtggggccctgcggttcaggacagggcctttaatccgaatgcagtgggaagccgcggggtgttcaagcacagttctgtgacgatatgttttgaacacgtactgtacgaggcatcattcttagcctgtgacgcaactgaggtgacacttacaaggtgctgttattcacactgtttatttatttatttgtttgggttcttttgtttttgtttgctgttgttgttttgagacagagtcttgctgtgtcgcccaggctggagtgcaatggcgcgatctcggctcgctgcagcctccgcctcccgggttcaagcgattctcctgcctcagcctcctgagtagctgggattacaggtgcccgccaccacgcccggccaagttttgtatttttttttttttttttttgagacggagtctcgctgtcgcccaggctggagtgcagtggcgcaatcttggctcactgcaggctccgccccctggggttcacgccattctcctgcctcagcctcccgagtagctgggactacaggcgcccgccacctcgcccagctaattttttgtatttttagtagagacggggtttcaccgtgttagccaggctggtcttgaactcctgacctcaggtgatccacccgcctcagcttcccaaagtgctgagattacaggcgtgagtcactgcgccaggcctaaatgtgttttgaattttgttttacatttttaattttttttttttttttttttgtgggagtctcactctctcgcccaggctggagtgcagtggcaccatctcggctcactgcagcctccatctcccaggctcaagcaatcctcccacctcagcctcccaagtagctgggtctacaggcatgtaccaacatgcctggctaatttttgtattttttgtaaagacgaggtttcgttatgttgcgcaggctgatgttgaacttctggcttcagtggatccacctgcctccgcctcccacagtgctggattacaggcgggagcccccgtgcctggcccagactgtttttatatatgaggaatgaggctcagagagtgactcagatgaagtcacgtgagtggcttagccgaggggcgacgttcagaccccggccactcagcctcagcgcaggctctcacccgcggtgtcctgccttccgtggccggttggggttgggctgcgtgccccagatgggagcgtctggagacgccgggctcctgcccgtcaggcatcagtgtggtgcccgtcctggcacgctgtgcatagcaacaggcaagacggttcttctcgacgacgccactgaacgtgagactcggagcaaggcaaggcctgggaggggccgctcagagctgacctgggccctggaattgctggagcccctcacgtccccggcagcaagctccatgcccagaaagtgttctgggcccgggcagggagggtgaagctggtatcagagaaggctgttgatgctgctttttttttttttttttttttttttgagatggagtctcgctctgtcgcccaggctggagtacaatggcacaatctcggctcaccgcaacctccgcctcctgggttcaagcggttctcctgcctcagccccctgagtagctgggtttacaggcatgtgccaccacgccggggtaatttttgtatttttagtagagacagggtttctccatgttggccaggctggtctcgaactcctgacctcaggtgatcctcccacctaggcctcccacagtgctgggattacaggtgtgaaccaccgcgcccagccctgttaatgtttcttaaccactccaggtccagctcgaggcttcagagcccatggaggtctgacaggtccttggccttcccgtggcctccagcgtgaagcttcctggtcaggaccacagaaggcctctcatcttggactttgacctctgagggcgcccctttcctttcaggacagggcctccgtgttgctttggccctggcctgttccttttctcaagagggccccactgcccctgcccttgccactctggcatcctcgacctgccctgggctggggcagggccggcttcctggctggtatttgtagcccagttctgagctgaagctgaagcctccaggctgcctgcacagggaggcagtggtggggtgggctggccctgaggaagacggagccctaggccgctgggggagatgtgcctggctgtggggcctccaagagcagcccaggtttggattttgtctgcttctcctcaaggtcagccatgcccagcccgggggctaaaagcaaagtgggtgccagggcaggcagaggctctggagtggacgtggggccggcagaggcgctggagtggacgtggggccggcagaggcgctggagtggacgtggggccggcagaggcgctgtagtggacgtggggccggcagaggctctgcagtggacgtggggccggcagaggcgctggagcggacgtggggcaggcagaggctctgcagtggacgtggggccggcagaggctctggagcggacgtggggcaggcagaggtgctagaatggacgctggggaaggcaggttgctgcgggtgctaagaggctagcctgccttggacaaaagcgtcgttcagagctgctaatccccttcctcccatgaggcttggggaacttcgaagttctctggtgttggaggggaagccagccgaggccctgggacacggcatcagcccgagcctatctgtggctggcctgggtatggcaggtgggcacaccttggctgcaggacaccttggctacaagggagcctggctgaccctgcagggtgagggctggagaggcggagcctgcctggcctagcagtgtggatgccaagccatgggaagatgtgtggagagtttatggagcctggcccggtgtccccaacccagctgctgagctggaagccaggggtaggtcctggcagcccctccctctctgccctgcctctctcggagtcgctcggagcagtcacgttgacggaatcctccggcgcctcctcgagggaggagaggcagggtcttggcaactcccgtctcccccgttgccagcttgccagccccgccgtgcctctcacgcctgtggtctgccccaatgacaggccggcttcggtgtcccaaggggacccagccctgagcgtggggctgcccttgggggagggcaggggaaagccagcccgggctgccaccgtggccgctggcctgggagccccaggaaacgtgcccaccctcagacccgatgcctggctcagggcctgggctccgcggcccctccagggcaggcgtgaaatgtgcccacacagctccaccttccacgtggttccctgtccgggggccacttgcactgaggtccttctggagtcattttctgtttttttttttttttttttgagacagagtcttgctctgttgcccaggctggagtgcagtggtgctatcttggctcactgcaacccctgcctcccgggttcaagtgatttccggctaattttgtatttttagtagagatggggtttcgtcaggttggccaggctggtctcgaactcctgagctcgagtgatccgcccgcctctgcctcccagagtgctgggattacaggcatgagccaccgcgcccggctgggagtcattttctagcgttcctgtcccacctctcaggaacagatttaccacctttgttgtgaagaagcattttttttttttttctgccgccaggctggagtgcagtggcacaatctcaactccggctcactgcaacctccgcctcccgggttcaagcgattctcctgcctcagcctccccagtagctgggattacaggcacccgccaccacgcctggctaatttttgtatttttagtagagacggggtttcgccacgttggtcaggttggtctcgatctcctgaccttgtgatccgcccgcctcggcctcccaaagtgctgggatgacaggcgtgagccaccgcacctggctgaagaagcacttttttttatgaacctctgcaaccccctctgagggaaaccctcccgcattctgggatgccggggctcagagggtggagggtagaagagcgccagccgtgagaggcaggatggggcggcccccgagggcagggctgtgcctggaggcagggctcctcggggggtcagctcctgggcggtgggagtgaccgagtgggctcctgagggaagcggctttcaggaaggaggcggaggcctgggagctcttggggccctggcaaatgtggtcttcagattcccgtcgtccagtgagcccctggatcacgtcctgagtggcgtccactgaaggctgcttgggacctctgctcccccctccactgagacccccagtggccagttctaagtcccacctgccttgggcagggccaccacaggccccttactgtggattaaagggccctgggtgagggcttgtgggaggggaggtggtggaaaccatctccgaagaccttggggcgagctgcgtgctggagtggagagtgtggcccagcaggcaggagcactgggttggaatgggggctctgccacctccgagggagcaggagtggagaccggagggagcgtgcccctgaatccgagcacggggagctggccgggagcagccctccgggcagaggcaggagaaatggggtcacctgccccagggggtgagaggtgagccgagaggaagggctgagaccctcaggggcatccccaggatgttcctgaaactcagccctggaggacgctcaggtgtgcgtggagcaccctctgccctggagcctcaaatcctctccccgctgcggggccactttgctgattcctgccccaaacatgaggtcacttcggtccagaaaggcgaggcgacctccaccagccacctacgggattcttggcagagaatccacgctcaccttcgggtcttcactcctgctccctcggaggtgacggagccccatttcaacccggtgcccctgcctgctgggttttcgccgcaggggacctggtcgtctcctggacatgagcccccagcgccagcgtttctctttgggagaggcctgaatgcgcagtcatgatttgaccaggcgaagtgcccagacaaagagaaaacagtcggccggatgcaggggctcacgcctggaatcccagcactttgggaggccgaggcgggtggatcacctgaggtcaggagttggagaccagcctggccaacacggtgaaaccccgtctctactaaaaatacaaaaattagccgggcgtggtggctcgtgcctgtagccccagctactcgggaggctgaggcaggagaatcgctcgaacccgaaggtggaggttgcagtgagctgagatcgcgccactgcactccagcctgggcgacagagtgcgactccgtctcaaaaaaaaaaaagaaggaaatagttgagctgctctcagtgaccatgtacggcccagtcgtcgacccctggcccagtcgttcgtccgccttttggctccacgatgttttgcagcctgtttctgtctcctgcctgtggcccaccttggggaggccccagtgctcgtgtgcccctggtggtcttcccagcctgacccttcacgagctccctctgtctccctgcttcaggtgatcagacatcccccaagtacctgctcccctgggcccatggaaggcacctgtctgctgggaccagagggtgagcagtcaggtgtcccatccaccaacgtcccaggggccagcccctccaccccggtgctaatctcatcaggaaatagcacagtccacatttcccaggagttataaatagccagcgcagttgcgggcagcagcgtttctctggaaaatgtacgctgtgcctctccctccctcctctgtgtttaaatgatatcctgaaatagacttggtttctggaggctgatagcctcctgggaaacagagcgtcgttgtcagggcaccgtggggccaggcaggcctctctgagcggataccagggccacacctgcagcaggcaccagggccacacctgcagcagataccagggccacacctgcagcaggcaccaggaagatgtcagggcttgaggggcttacagcttaggaaagtgcccctggcccaggcctggcctcagaaggggctggagtgtgtgagacagcagcaagtgtcgcctgggaggctgcagagggtagatcttagtggagcaggaaggcagagaggacccaaagtttcccactgtgacctggggctctccgagaaggctctctggaggaggcggggcgagaactgggccttagcatcaggaggtgcagtcctgggtcagatgtgcccaggttgaacctggcagctggagcggaagtgatgggcacgaggcagcgggagggctgtactgggggtggcctcccagcaccaggtctgcccaccgggtcgggacacacaccaggaggcccgatgttgcctttctgaggaagcagcagttacagcagctgcgggtcatggacttcacacattctgcagtttcagcagagagggtgctgggggccttgattttgaaccccagctctgacttcctaggtgtgcactgggtaaattcctcactctcgttaagctgcagcatcctcatctgtgagatgggagcggctatgagagcttaaaccgcatatgtctgctatcatgatcatgaacgcagatgctgtgtgtagaggattcatcagtgtcagacttgcaggaagagctcgagataagtccgttgctctcactcttccataacagccctgtgagtcaggtgtggatgcctccatgaggaaattgaagttcacggaggtgaaaggccttgcccgagtgcgcacggttgaatgggagactcagatcagcctgcctccaaatcctgcacactccccccgaccaggttgtgtccaggtccccctgagacttgggaagggaccattggctcagcttcctgcagaagctgccaggaggcacccagtcgtgggaagctggggcggaggaggggctgtgggtgaatcggaccaggggccatggaattggcctgaggcttatgctgatgtgtggagagacctgcctcaagaaggggtggtctcaaaacatcgaactgcgccccataaatacatacaactgcaatgtgtcaattaaaaaataagggcccgggccaggcgtggtggctcacgcccgtaatcccagcactttgggaggccgaggtgggcgaatcacgaggtcaggagatcaagaccatcctggctaacacggtgaaaccccgtctctactaaaaatacaaaaaattagccgggggtggtggcgggcgcctgtagtcccagctactcaggaggctgaggcaggagaatggcgtgaacccgggaggcggagcttgcagtgagccaggatcgcgccacagcactccagcctgggcgacagagcaagactccgtctcaaaaataaataaataaataaaaaataagggcccacacagtggtacatgcctgtaatgccagctcttcaggaggctgaggcaggaggatcactgaagcccagggcaacatagcagcctggacggcacagtgagaccctgtctctagaaaaataaatacaggccgagtgcggtggctcacgcctgtcatcccagcactttgggaggccaaggtgggcggaccacctgaggtctggagttcaagaccagcctgggcaacatggtgaaaccccatctctactaaaaataaaaaaattggccaggcatggtggctcacacttgtaatcccagcactttgggaggccaaggtgggtgggtcatttgaggtcaggagttcgagaccagcctggccaacatggtgaaaccctgtctctactaaaaatacaaaaattagccgggtgtgatggtgcgcacctgtagtcccagctaattgggaggctgaggcagaagaatcggttgaacctgggagacgggttgcagtcagccgagatcacaccactgcactccagcctgggcaacaagagtgaaactctgtctcaaaaaaaaaaaaaaaaaaaaaagagggcatggccgctccagaatgtttcttccaagggtagcatctcagttgacaaagagcatttgattcctccaccctgtgtggctactgctgggggacagagctggggacagacccaggcccggctccgtgtccagacgagatgaaggaactacgagggacagcctgtgtgatccaggagggtttgcaaagaacagaagcagcttagaggggagagaggtttcgggaaagtaaggccagagctggggcttcctttgagaccctgtaggacccctgcctccagccgggctggtgatggcctcacgcttcccgtgtgtgaagaggtgcccggagcagtggttctccctgaggggcacttggttctctgcacacacccaacttctgtctcctgttctgggttccatcccttctctgggcagggcgaacccagtgcagacccagaccccgtcggaggcttgggtaccacctgcccccagccggtgtgtgggtgatagatgtgggaaggacctacatcgagctgcaggaagcccaaggctgacccagatccagtttcccttccgtgatgacagtggcctgttatagcaactgcgttcaaaccgtggcacgcacacctcagagtgcacagagacgttctgagggcgacgtgggcaggagagttttcaggaaatcagtttgcagattctcagctgccataggtgctattgccagaaagccatctgcctgagagccagcatctcgccatcctgtcctctgcagaggagaggcctgaggctggctgtcggggcttggcccggggtgcgcagacctcctgggtggggaacagaggggcttttagaaatgttggggtaggggccaggcatggtgggtcacacctgtaatcccagcactttgggaggccgaggcaggtggatcgcctgaggtcaggagctcgagaccagcctggccaacatggtgaaaccccatctccactacaaataaaaaattagctgggcgtggtggcaggcacctgtaatcccagctactcgggaggctgaggcaggagaatcacttgaacccgggaggtggagcttgcagtgagccgagactgcaccactgcactccagcctgggcgacagagcgagactccgtctcaaaaaaaaaaaaaaaaagaaacgttggggtcagtgttcagaaagtaaaagactctagtggccacttagaacctttcaaaagtcaggtggtatccagttctttgccttccacaaaactgatggaggactcaattttcaactgagagatcatttcaagtaattttcagtaataggtatatatgcgatttaaggcggatagcatggagagaggttaaagaatggtgtaacgcggctgtgataaaactcttttcgacctcatctacttctttatgtgaacaaaatgtttcattgttcacatatttcttgttcattttagagacatggtcctacattgcccaggctggtctcgaactcctgggctcaagtggtcctgtggctgggagccacagcacctgcacatctttacaacaaaaccagaaacatgaaccaaattgatgctgagcctcgtttcactctagcaaaaaataataccctatagatacgcgaactaaagcaaaaaatgttccgcccatctcattgagagagcattccaccaaaaagttactctgctacttaatatttattaaaatgtataatgaggccaggcgcggtggctcacgcctgtaatcccagcactttgggagaccgaggcgggtggatcacctgaggtcgggagttcgagatcagcctgaccaacatggagaaaccccatctctactaaaaatacaaaaaattagccgggtgtggttgtgtgtgtctgtaattccagctactcgggaggctgaggcaggagaatcgcttgaacccaggaggcggaggttgctgtgagccaagatcgcaccattgcactccggcctggacaataagagcgaaactctgtctcaaaaaaataaataaaatgtatataatgtgtcggcttactttttttttttttttcttgagacagggtctcactctgtcgccaggctggagtgcagtggtgtgatcttggctcaatgcaacctccacctcctgggttcaagcgattcttccatctcagcctcccaagtagtagcttggactacagtgcccgccaccacacccggctcacttttgtatttttagtagagacagggttttgtcatgttggccaggctggtctcgaattcctgacctcaggtgatccaccagcctcagcctcccaaagtgctgggattacaggcgtgagccaccgtgcctggctgtctttttaattatgtactgccaatcatggtactaactaatcctgaatatattttgaatatttggagccttgtggtctctggaaatttttgttttcaatgtatacagattttttttgtggaagcaaaatgtaatggtgaataaaggacttgaaaatataaaaatataaactaggacaacattctttaggagaaatggaatagaaacaaattcaaggagagaagatccaggagctctgtgagggaaagaagagcttgtttgtgtagttttttgttgttgttgttttttttgagacggagtctcactctgtcgcccaggctggagtgcagtggtgtgatctccgctcactgcaacctccacctactgggttcatgccattctcctgcctcagcctccccagcagctgggactacaggcgcccaccaccgcgcccggctaattttttgtatttttttttttttagtagagacggggtttcaccgtgttagccaggatggtctcgatctcctgacctcgtgatccgcctccctcggcctcccaaagtgctgggattacaggcatgagccaccgtgcctggcctgttttcttaatattgaattttgagagttttatataataagccctgaaattgggtaatattagccctatagctgtgttctttttcaacattgtttagatgttttttctttttttttgagacggagtctcgctctgtcgcccaggctggagtgcagtggcgcgatctcggctcactgcaagctctgcctcccgggttcacgctattctcctgcctcagcctcccaagtagctgggactacaggcgcccgccaccacgcccggctaattttttgtatttttagtagagacggggtttcaccgtgttagccaggatggtctcgatctcctgagctcgtgatctgcctgccttggcctctcaaagtgctgggattacaggcgtgagccgccacgcctggcctcgtgtagtttttaaatggatgagtgtgggtatcacgtcgctggggtatttagatcccactgaatccatgagaaggaatgatgtcacacttttattttaggatggcaatattgacatgattttggaaatcatactctttgcaactatttaaacttggaaatgttcagattttgacttcagaaagtgccagggagcgcacagttgctcagaattagttcgcaggtgcacaggcagacgggcgcgaaggcccccgagttacagaaacagaacgtggaacagtcctgtgtgagggttgcctctgacctcccctggggtccgcacctccctgggctccagcccgagcctggggacttcccctgtggaggatttgcttatttgggagccaatggcttgacccaagttttctccctgaatcttcccagcaatcccagggaggcaggttctgttgcagatggaataactgaggcttagtgagtttaaaacttgccaggattcaaacccaggcagcctcctgtgcgcgggctcctgactcttcaacacctccacgtggatgggctggttccctcctgatggacttgagcgcctcctaatcaggtgcttaccttttgtgagcctcagtttctgcatctgtgaaatggggtaataatacccatgtcccgggctggcagccaggagtgcctaacagggtgtgccctgcctcccccacggtgggtaacagagtgtgccctgcctcccccacggcgggtaacagggtgtgccctgcctcccccacggcgggtaacagggtgtgccctgcctcccccacggcggccacaggggcctgggggctagggtccccccaaagggttgatttccaggtaaacatcagcttatcccagctgctcacttccgccttcctgactgtgtagctggctctgagcagtgctgacccacggggagatctctggcttggcctccgagctggcacctctctcacccacattctctctctgcagctggacccacaaaccgtggagaccaagaactggcacacggacgtgattgagatgaacggggtgagccggggatgggaatgatcagtggcgtgagccgggaggtggaacgtctgtgcagcaggtgggcagcccggccctgtggctgctcctggggccgctgtgccgcctcgacctccccgcagcccagccccctctcccctcctgcccacaccctgcccgctgctgtcctgcaggtgttgtgttgagggagacctgggtgtgagctagccctcatttgcagtcttggggaggggacccctgtgttttgggggcattcctcgggcactcacaccctggggaatctttacctgcctcaccccccaaccagatcaaagtggaattttccatgaaattcaccagccgagatatgagcctgaagaggaccccgtccaaaaagcagaccggcgtcttcggtgtgaagatcagcgtggtgacgaagtaggtgctgcctcgggtctcccagtcctggcgtcggtgccccgggtcccccccagcccgggccccccagccctccccgccggtgcccatcctggcacctaatcagttaccccccgctcggcggtggcagatggccggtgtggatctagagtggccgcagaggcgctcacaggacacttcagaagcacgcgagccagcacctaaacgctggaaggtctcttgtgagatcccagatcgtctgctcctcgtaacaagcgggaagctctgtcagccgggggcctacgtttgggctcggcaccaacggggactggcggcccctcgggaaagggcacgtgtcccccggttcaccaccaccctggccccttgtctcaggcctgacccacctcctcatgtgggctgcctgctgggcctcctacaagcatctgaatctgggggacgttctttccctagagtctcggccttaccttcccaagttcccaaggcttctcctgcccacgtccgtcgatgccccttcggcaggcctcgggtgggctggctggggtggggtgcggtggcctctttctctgccctgcccctgcccccgccccagctctccatcccaaatgctagaagctctccagggtgtgtgtgtgctgggtgggggttgctacgggagagctgtcgtgggggctgccctccacccatcctcacgctccaccccaggcgggagcgctccaaggtgccctacatcgtccggcagtgtgtggaggaggtggagaagaggggtatcgaggaggttggcatctacaggatatcgggcgtggccacggacatccaggcgctcaaggccgtcttcgatgccagtgagtctgggaggcccagccggggcaggtgtggctgtgtctgagcaggctggtgggatggacaggagagctcgggggaaccaggagcctccctggagaggaggcttgctctgcttcagagtccccgtggcaagtgctttctcttgtaatcccctcccctccaatctcttgtcccttgctgcaggtaagcaactgcagaaactcacaagggccgactcacttgcccaggatgacccaacttgtaggttttggttctggacttaaaactcagatctgactccagtgtctttcttgctagttcctgggtgcctggtgagccgcagggaaagagctttgagcctgcacctgctgtctccagggccccaggtcccctctggggcagtgctgcctctgcgtgaagcccaccatggtgaggcctgacctttctggtttctcctccctgctcctgctggttcaggtgcagcagccacataccccactgtcaagaaacctgcactggccaggcagggatgaatccgtggggagcctggagtggaggacggggtggggcctgggaactggccggcgttggtgcctctgtgcagcctagaagctgaggctttgtcggaacatgcttttacgtgtgaaaagtgtgcaatgccttccagagaggggcttagcgatggagaggttccagtcggaaggaagctgcaggccacatggtatgaatgtggctctgaactctgggtgatggatttcactccccaaacaccctttcccaagcagccacagcagatggcccccaggctatctctccctgttcccccaaccccgacccacagagccgagtcacagacacctgtgggccctctctacatcctgctcttccaggggagaccagaaccagagctggagtgggtgggggctgtgtcaggatgggtcgggggtggaacggggctgctggcccagctaaggctgcctgacctcggccccacccctgcagataacaaggacatcctgctgatgctgagtgacatggacatcaacgccatcgccgggacgctcaagctgtacttccgggaactgcccgagccgctcctcacggaccgactctacccagccttcatggagggcatcggtgaggccctgagggctcctaggactgggctgggccagactgagccaggactccctgcccggagaagtaaccagcaggagaaatatctgtggcttcctttgctggctgaccttcccagtgcactggggcctgtggctgaggggtccgagggtgaggtgtggcctgctgggacctggtgcagacactgggccctttctcgcctgcctcttgcccctgatgtccccatgggcagccccttctgcttcctatttggacgttggcctcttgcttggaagctcgagcatccagggaagactgccctgaggtgagtggccagaagccagcatcccagaaccaaggaggaggctggcttaagccatagggcactcgagatgggttgtgctgagccttccagcgggaccacacaccgtcccgtcacctctgcggagggccccggccagcaggccttccgcctccacccacctgggccaaacccagccccaaggaatcccttcagccttctctgctcctggggcagactggagcttcagcccccacggaaggctgcttgcacccacgctccagcagcagaaggggtggagaaagagaatccaccgctggcaggatatgtccctactggcttaaccttagccacacagaccagggggtgtcctgttacgagacaggggatgccccagcacccaaggcctatgcagtcagctgcaggaagggggtctgctcccaccagccggcctcctggctgagttaccagtcgtggtggggcctcctggaggaagcagctgctgacagcccacccagacaccaggccctcccctgtggggtctgctccccaaaggcctggaagcctgggctctctcccgcaggggcccacagcctcacgaccacaggggccctggcggggagccccaggagccaaacgccacactggcccttctctcccacagccctgtcagaccctgctgccaaggaaaactgcatgatgcacctgctccgctccctgcccgaccccaacctcatcaccttcctcttcctgctggaacacttgaaaaggtaacggggagcggccccaaccccacctcctcagtccctcctcatgaaaaggtaacggggaggggccccaaccccacctcctcagtccctcctcgtgaaaaggtaacggggagtggccccaaccccacctcctcagtccctcctcgtgggcgctggcctccatcgggctgtctgtggggagtgagagtttgctttccaagttcttgcactcatgtttttctgttttgagaaatatttgggtcccgtaaccagtagtaacctcaaatattgaccatagaatgctcagaatggcagggtgagagcccaggactacaggcaggttttataatcagtgggtcccaacctactggtggttcattcaacgaatgtagccatttctagatgcagtggggggtggacagcagtggggggtggacagcagtggggggtggacagcagtggggaatggacagtagtggggatggacagcagtgggggaatggacagcagtggggatggacagcagtgggggacagacagcaggaggatacattgtaagccttgatgcaggtgctgcttttcagttacatagagacgtgtggactgtgttacagcatgggttgtattgtgggccacagtcaaaaaaggtgaaacccactggtcttggcccacacctcactagacatagggaaactgagtccccacaccaggcggagacttgcttgggttagtagcagacctgtccttagagccctcaacttccagatcctaaattcagacccttcttgccttcccaccaccctttctagtcaggtccaaccaagagtggctaaagttggttgtacttgtagcaaagttcagaggtcctcaggcttgcgtggggaggtggtccctgggcgtcccttaaacccacctgcacgccaggaccggggagccccctcagactgctctgcggaacaattcttccctgagctcagccccagctcagggccaggccccccgctgcagctcagccacgccaggctcgggagagccagtggagacctggacgcgcccggggctggtgtcttgtttttcccatcatgaaacatttttcctctggtttggccaggactagagccccaaccaattccgaaagcatttggcaagccttgtggggaggagtgggaagggaaaattcattcggcttccaccctgggaactgggcacagtctgttcccacatctgggcccctggctggaccgtgtgcgcgcgtgtggtgaggggctggccccgctgcacagctgcctgttggcatcacagtgtttgtttgcctgtttccaaagcaggcgcagccacagctcctgcctggagggtgggaatgatggtattgagggtgagaggcgctgcttagggtgggtgggtctcagcccagaaacattttttgagactgaaggagaaccagaggccctctgatatgtttgctgaccctgggcctgcctggacaccagccctgatggcagctcctgctgttaccccagggaagcatcgcagagcatctggcctgttgagtaagagaagcaggagaggatccagagggaggacaatcctgggtcccacgaggcagacggagaggcataggaggcagccctgggtcccatgaggcagacccttccggagaggcacaagaggaagccctgggtcccacgaggccgacctttccggacaggcacggggggacagtccccgggctcatctggaagtagggctgctcctgccccagcacagctggcagagccccgggtctagctagtgactcctgctgggctccaggccctgcctgcctttctcccctgccccacccaccttaactcttcttttgggccacttagcacatgagaaagcaacagagcggtaggtcctggaggcagctaccggggttcaaatcccagctctaccagttgctggctgtgtgaccttgggcaagtcacttaacccctctgtacttcggtttcttcatctacacgatgggggtgacgataatcatatttacctcaaaggactgcggcgagtgtgagttgttccagggagttttcagaacagtatctgctctcaggcaagggagctggagttggcatctgtgggctccctggctctggcagttcaccatcagttcagggggacccagcagctggagatgttagcacagaacactggcacatggctggggccctgctctcctggatgagtccccttcccccgggggaggtccccactcctaggagacagagacgaggtgaccccttccaggagtccttcaggagttcccacagcgaaggccaagggtcctggagctccgagtggctgctgaggaagggcttctttcctccccatcttctccttcttagggttgccgagaaggagcccatcaacaaaatgtcacttcacaacctggctaccgtgtttggacccacgttactgagaccctcagaagtggagagcaaagcacacctcacctcggctgcggacatctggtcccatgacgtcatggcgcaggtaccctggcaccgcccgggcccgtggctggcggagggtgacggtcccatgacgtcatggcgcaggtaccctggcaccgcccgggcccgtggctggcggagggtgacggtcccatgacgtcatggcgcaggtaccctggcaccgcccgggcccgtggctggcggagggtgacggtcccatgacgtcatggcgtaggtaccctggcaccgcccgggcccgtggctggcggagggtgacggtcccatgacgtcatggcgcaggtaccctggcaccgcccgggcccgtggctggcggagggtgacggtcccatgacgtcatggcgcaggtaccctggcaccgcccgggcccgtggctggcggagggtgacggtcccatgacgtcatggcgcaggtaccctggcaccgcccgggcccgtggctggcggagggtgagaccagccccttaggaggagagagaacagctcagagtccccacacctcttccctcgtgggaagctgggttgatgggctatggggtgtcaccagggaggcaggactgtagacacttctgcccctcccaggccaaaacaaacatgtgagcctagaccagggcccagagatgctggctgcattctcaggagggcctcagtctcagaaagcaagcccaggggtggggagatgctgggcccttgtcctcatgggtggaagctctgaggttgcttccaagggcgggaggcttccctgggattcctgcaagacccagagcaggggccggactgtggccgcctcaggacagagcagaagcttatggccaggttggggaagtggccctaggcccccgaccctctgccccgtagcaccttccacggctgcagaaaggcaaacacacctgggctccccaggaaggggcggtggccggagccagtctagggagtgggaggggcaacacaggctggagtcagcaaggacgaggcctaggacagggagcccagcctccgccttcctgtctccccacaggtccaggtcctcctctactacctgcagcacccccccatttccttcgcagaactcaagcggaacacactgtacttctccaccgacgtgtagcccgaggcagggtggctgcgggcgggtggtggaaccagcccctccagcctggggtccaactcagacttgaaagactgcaatagaaaactcccaaacccagcactccagactcgagggaagccagcttccaagaactggaatgcgtacgtcttttgtgccaccttgtacaaagccggctgcccagccccagcctcaccaccgcatcccacctcctgccctccatacctctagttgtgtctgatgctccgtgctgttcgggaattgttttatgtacacttgtcaggcagaaaaggtagtgaccggcccggcgtgggcacacagacagcccgctttgttctttcatttcctccagcactttctttccgcctgagtccagcccaaggccttttattttgcgctgtgtaactgctgccagcttctctcttggccctgctcccagatggcggtctcctggcagcctcccctcagtcttcctccacccgctcttccttcccagcctgcctgcatgcatgtgcacccttggtcttcgctccatcgccttgaaagctctgaagaggccctgggttgccgcggcagcagtggtctgtttgatgctgccgtttgccgctgccggcccctcctcagactccgcctttgggagcacacctgctttgccttgctgcctgtgcaaatgttggacaagcagacacactcacactcgtccccagcttagcacagagctggagcgcccatttctggaattttccgtttgggaatctccacttctggggtttacctgttcggcctcctgtctatcagtgaggcatctctgactgtttcttctactgcttttcagttcccttccctgctgttctatttcctttgagtgtaaagactcacaggtgacctgctatcgagatagccagagggtcaggagagaatgggggaggaggcggtcaggctgctgaggaaacaccacaggctgaacgggggaggaatgcacatgccacgctgggtgtcccgggtcgcggggaggcagctcagctcttaggagcaagttgtgggggcttttcaagaggggccaggcttcctggagggtgactgatgtggccgaagcaggtgtccaggcaggtaggctgcagccaggagctccctggcaccgcaggacctcgtggtactcttgccttagattttacacacactccacagccaagcactgccacggtcctccaggacctgggaagcaaaggcacaggcccacggtggccagccattgtggtgccgccccagcttctggatacagccttttgggtaaacactgggaactccagaagttgtggggagagtggggaatcagacagccgcctctaggggctgggttctgctggggcctccttgttggtgctgtaggcacccgccagggagcagggacccgacttgcagacgcattgcccggtactaggaaggagtgaggtgtgttcccaccgtacacttcccacacgagctgcggctgccagcctcgggccatcagcctaggagagcagatgcagctccaggggctcgacttatagccagttacagctccccggctcttctgtgtggcagagcgtcgtttccgggccctcagggctggggagctcagttcccattgcttgtgctcagggctgagtcttaaagaagggtttgccggccctaacgctgcagcgcgtgcgcggtgagaggccctttttgagcctgtttactcctgtggccttgggcagaacagtaaatactctgtgcacggaggaaagacatgcccaagaggaaggaagtactgaccatcggctgcctgtgagcagcttagcaaggagcccttgctccctgggaaaggcggtgaacttgagtctaaagatgcagtgcctggcccttcctaaggtccctgcctggcatccgagtgtcggtgtgtggcacagaaggctcctgcttgcttccaaagtgatggacaggaaggggcagagtgagtcacggcccagactgggcaccttcgcgtctcagcctcagggagccccacagccccaagctcgctgaggcaacgtgagaacaggctatgggaaggctgcaaaggctgagaaatgcaaaggctcatatttataaatcccacccccagagtggggagggtcaggtgccagacctggactaaactgcaccaaggaaacacccagcagggtctcctgtgagccggggaccatgcagcccgaaacctccagtcactgcgcccggcaggagtcaggagccagggactgtgcagcctggaacctccagtcactgtgcccagcagggtgggctgtgcccagcaggagtcaggctaagaaacgccaggtctgcctgttcttgctgggcaatggctgatggctgccagtttctgctgatacacaggtaggatgggacccttcatgaatatctgactttaataagttggtaaggatatatttttttgtctatgttctgtttcaacttatgtagattattataaattgatgtaaaccacgtgagaggaaaatgttaataaaaaatgcaaagccccatcatttgcacaaaactca

SEQ ID NO: 436 - DNA, 110440 bp, Homo sapiens
  source 1..110440: mol_type = genomic DNA; note = NT_187664.1:c153205-42766 ABR [organism=Homo sapiens] [GeneID=29] [chromosome=17]
gcccctcccttgacactgccttgggagtcagtcaccaggtcaatctgtccctgagactgtcagctccgcgagggtaggcacggggttccctgtccatggctgcattccgatgctagcacactgcctggtgcacagcaggcggctaacaaatgcttgctgattgggtcaggcggttaacaactgcttgctgattgggtcaggcgttaacaaatgcttgctgattgggtcaggtggttaacaaatgcttgctgattgggtcaggcgttaacaaatgcttgctgattgggtcaggcgttaacaaatgcttgctgattgggtcagggaaggagggaatggagggtgggtgtgggggaagactgtggggagtcaaccattggagactgagatttagacttgatggtgtcagaaatctcagtggctgcgaaagatttcaaacagtagctaggtgtggtgtgtgcttatgcccctcaccctccatgatgctgttcagcccacttctccaagttcatcttctgtcctctagcaagcagcgcttcttaacctgccttccttcctctcttccttccttccttcctccctccctccctccctcaagacagagtctggctctgttgcccaggctggagtgcagtggtgcgatcatagctcattgcagcctccaactcttgagctcaaacgatcctcccacctcagcctcctgagtacctgagatttcaggtgcgccactgcaaccgggttgctgaagctgcttaaccctttcctttcgggccttctcttctttgcctggaaacccttccctatttccagatgctactcagaagccactgtcctgtgaagctttcactctcaggcagcgttagtgccactgtcctccatccccagggtggctggtaaacgagaacactgcctcgtgtgttcacacgtcctcaccccagacggatcgagagcctgagaacggcaagggccccgtctcccagcctcgtatgtgtgccatgccaggccttttctgggtatgaatgaatgaatgaacagacagatggacagacaagatcaggagccaaagtggggaagtacgtgtggtcgtgtgggtgtaagaggctctaaagcttggtggggtggtggctttggcaaaggaaaagaagaaccgaaggacttggtaaaagggatgtgggggttgagggaaggaagactcgtaagatggcggccgcactaacagaagtggaaacccggaaggggaagctgtttcagaaggaggaagggtcctttggtccagatgtgtggagtggaagggccgtggctgggcttccaagtgaggagacccagtggccggggcaggtgctagacctagagcccagcaagacaccagggctgcagctggcagcgggccaccactggcctggaagggagaagggctgcttctctgggggaagggagcagagggctgaggctgggcccaagcaagtgactccacatttacaggaggcgggagaatgaagggccagcctacaccagagagtggtcggggcagtgcctgcatcaacagggcagctgagggcttggagaaactctagactgcagaggccaaagagtcggagagggaggcctctggctttggaataaaccgtttgggggggcctttgaagcaggctgcttctatggagaacattaggagccaggccgaggcagatggagtgtggagctcaggtccagggctggctcagggcatttgtcagggaaggggagggaagctgtggggactggtgagtcacttcccctccaggggggcaccgagggcctgtgagtggagtctgtgtctgatggaggggcactctcattactcactggaatttccagccaccggggacagggtggagtagagaggccctggatactcagggagtcacttgtgtggggttcagggattttgggaagaagtgggcgtcagtctcaccatgccgtgtagaggtgtggggaacggggacgaggatatcctggcagacttccaagggcacctcatgtcctcttgagtggaggaaggaacacagcaggggcctgtggggttttaggcccttcttcgtgtcacctgcaggtctgactcatgtgggcagcccatgccatgcacttggagcccgccgggcgggagacagaagaacccgtggtaccaggccctgagctggcatacttgtgccctggggaatgccaggcctggtcgttcccaagccctcgccacagcctcacccgcccgcaccaaatgaggaattgtggctgaaagggcccttcagatgcgccctggctatttataacccacccaggcagggacaggggaaaaccaggggctggaaggagatgggtggggtgggggtgtgcctctgttgaaccctggtggcacagttccctgatcaaaggctgttagccctggggcccctcaagggctcaccccgcaatcccctgctctgtatttcagctctgcaacaggatggagcctctctccagggagggcagcttctctgctgccaatggaattgcatgagccccacctagagcccagagcttctgaagaattctggggggagtggggggctgtggcctgaactcgggccacaggtgtggttcatttagacggcaccatgttgttttaaaatgttaattatttgccatcgttttaaaatcaggagcattcctgttaataagccagattttagcttattttgaacagagatcaggcagccatgagcttgcgtttcctccagcagccatcggctggagtgagtggtggtttcaccctgccctacctggctcgcttcaccggctggcctcacccgcaggcctcacccgcaccctcatgggtgccgtttgcaacctttgctccatcgttgggttgtaaaagagcttttcccagggcctcctctggactcctcctcccatggaaggaggtgtatgtgcatctgggaactagggccagggggaccagaatgtggcctcactccctgcacagttgggggttctgcaaccattggagaagccaggggaagctggctgggagtgggcagggccggagatggtgcctgtcctgggttctgtgtgcactccccttgcaggatggctccctgcggtggggtggctgggggggctgcttggaggaggtgggggtgctggtctcagcagtgcctgtgagtaggtgggaggctgctcagaggaggtgggggtcctggtctctgcagcgcctgtgagtaggggggctggtctgtgagtgggggggctgctcagaggaggtgggggtgctggtgtcagtagcgtccgtgagtggggggactgctcggaggaggggggctgcttggaggagggggatcctggtccctgtgagtgggacgcccaccgctcctgtgcaggacagtggtggcgccgcgctcctgcctgggggcaggtcaggcctgtctgttgcaaagcctgactcctccagcggcggcgggacgcggctgtggcttctgggcgggccggggcctcccctccggaagggggctccggcgcatggggactccggggtggctctgggggtcgcccctgctcgccgggctcctggctcggccgcgcgcggggaatgaagatgcgtctgggaagcggcctccccgctccaccccaccccggcccggccgcggcctcctcgctcctcctccgccgcagaagcctccgccagccgcggccccgcaaccccagaggacgggcggctccacctcgcgacgcgcgtttcctgtgtgttcggagcgagcgcgagcccgagccccggagcccgggaagggcgggccctgcggggccgggcgggacacggaggagggcgctgggctgctgtgcggcgggttcgcctccgccacgggccgggcacggcgtcaggggctgcccgggccttgctccccctttcgccgggcgaggacgcgcgaggcggcggcggcggcggcggagcgggctggactaggtccgggatgcagtcccgggtcgggagccccaggccgggcgcgcgggtgtagacctgccccccctcccgcccgcctcctccctcctccctcctcccgccgccgctgcgtggaccccgcttcctgtctgccctccgcgggctccggctgccatggaggaggaagaggaggcgataggcttgctggacaaggttctggaggacgaagatgtgtttctcctggaggagtgcgagctgggaaccccgaccagccccggctcagggtcccccttcctggtggctgtgaaggtgggagcgtgacacgccctgggcgctggggggggccgggccggcgctgccgaaggtgcgcgggagaaatggctgatgcgggcgcagagcgcgcggccgggtggaagccctcggcggagggtcccggccccggcagctgttcccgggggagaggggcgggcctgcctccccgaccggtgtcctcggggcagtggtggccgccccctccaggccagcccagctcagggctccggcggctgtgccaggagtcacctggcgcgcctgtcagcccgagcctcgccgcctccctggagcgggtgggcaggaatcccccgtttccacggcaaccgcaagagaggggccaccctcttcccagccaggagacagggacttggtgtctccgagctgaggcaagagggtgtttgcaaagggcaagagccagaggtcactgagcttccttgaaggaaaagcactgggtcagctgaaggggggagggaacagctggcttggaggctgcagccaggtgggcaggtgcccttcccgaggcgggacaggcagggagcatctgctgggccctggcccacccgctctggggctgacggcgttctctgcagcagtgacccgtcctgtaggagaggttggctcccggtggaactggagggcagtggtggccagaatcccttgaggagcggggcggccccggaaccacgccggctctgtgagtctggcccggcacaccacagcggtcttcctttttctctcctggacacacctctcagagcttccacctcagccttttgctcagctgctctctggttctgtgtcgagaagggaggcccagtgaggatgcgtttcggggagtttgcagactgctaggcgaggctgcctaaccgagtgcccatcggcggggcctagaaggcatgtgcagccagcattgctggggacgggaggctgtccctgaacctctctgggcctccctgcccctcacagaagatggggatcacagtcctgccccacccactctacagtgtggctctgaggaggagccaatggaggtaaaaatagatgcagaaccacgggagatggctgatgtgtgagtatgggtggagcggtggctgcaggcctgggtggggagtggagctgtagggaggctggcagtggctggcaccccaccctgtcttctctgatctggtgctggcgtagggccgtgggggtaagtcacgtctccccgtgggctcagggaggcctctgcacttagggtctgaccagcctccccactaggaacagggtgggaaagtctgctcctgagccaggagtcaggctgggagtagcaatgctgggatgggaggtgtgtggccctcatgggcctcctctgggaagcccccagcacagatgtgggcccactcagaggctgcctcctggacctccccttctgctggaccccggcgtatgcctcagctaagcccgtatttcattctgctcagatgctcagaactctagacatttgcctccgcaattatatcccattctcctggaggaccaggaccatgtcatattcattgctgaacactgcacagtgcttggtgtggggctggtgcctgtgagagtctgcacaatgtgtgaggcccgctggggcccacgaagggtgcaccaggttcccagcctcgctccatctcagaggtgtcctgctgtgtacggcggtggcccacggatgccaagagagcctgagcacgtgtcacacctgaaaacgctgctcctcctgggtccccgtgagcaccgggatggtgtcttcccctctactttgctgccagcatgggggaaggagacctttctcgaatgccggggagttccaggctccctgctccatcctgaacacctctagaattcctccctcctctaccggcattggcctcagagggagaagacaagcaggtggccacagagcggtgggaagaaagctcctggattcattcaacaaacactctcaggttaggtgctcttcagagcaccctgcctggcactgtagagatgacaagaggaacaaggcgtgatcttccctcacaaggcgttcagagcaaggggcaggtacagggagtaggaatagagtacggaagtaggcagggtgggccagatgcggtggcacacgcctgtattcccagcactttgggaggctgaggtgggcggatcacctgaggtcaggagttcgagatcagcctgaccaatatagtgaaaccacatctctactaaaaatacaaaaattagccgggcgtagtggtgggcgtctgtaatcccagctactcaggaggctgaggcaggagaatcgcttgaacctgggaggcagaggttgcagcgagccaagatcatgccactgcattccagcctgggcgacagggtgagactcagtctcaaaaaaaaaaaaaaaaaaaagactgtgagaagagtactgataaaagggcaccaaattcaggggagaagggaccacttctagtggagttggggatggcctggatgcgtgcatgtgtgtgtgtgtgcaggccaagggtcatttctggatgatacactcctgtcctgggctgcagaggttcttggcacacccttccctggcagctagtaggaatccaaggcaattctctttgctattactttactttaggggtacttaccttaagcagcagttgcgttgtgagcatgtgcccaagtgccaggcccataaatcaatcctgtttccagtgtcatttccaagacgcttcatcttcctggggggcagaggtaaagttggctgcagttttctccaaagctatagctggagtttgctgcatatctcagcccagacttacctttgaagagttattgatctgtaaaactggtaatgcaaataaaatactgatagcagcgtcatgttgcatttgtaaaatggcttacacttgccaaaaatgtttcatgccattctatttaaagataggtagggttgtgacgggggcgttgtagaaggtgctattttaaggaacttatttgtcaggaataaaaacccttttgtaatgcagattaaccctttaggtatcattctgtgccatttttttttttcttttgagacagagtctcactctgtcacccaggctggagtgcgatggcacaatcatggctctctgtggcctccacctcccagactcaatcagtcctcccacctcagcctccccctcactacaggcacatgccaccacgttgggctaatttttatatttttgtagagacagggtttcaccatgttgcccatgctagtctgtaactcctgggctcaagcaatctgcccctcttggcctcccaaagtgctgggattacaggagtgagccactgagcccagcccaattctgtgccagtttttaatggatcatctgaaacatctctatttctgtttcacctgcccaggtctcttgtgcctgcacatcatgcctgtatcccccatttggatgtttttctaagtgcgggccccacgtggtgatttgagaaatgatcggtggcacctcgatctatattttgcattttaatggttaagtatatattttaatatatattagaaaaaatatgacctgtacatttttcttacgatttcaaatacgtgtagggtaagactgctttttacaagtcagttcttgggcgcagtggctcatgcctgtaatcccagcactttgggagactgggcgcggtggatcatgaggtcaggagttcaagaccagcctggccaacatggtgaaaccctgtctctactaaaaacacaaaaagtatctgggcgtggtggcgtgcacctgtaatcccaactactcaggaggctgaagcaggagaatcacttgaacccgggagatggaggttgcagtgagccaagatcctgccactgcactccagcctgggtgacacagtgagactctgtctcaaaaaaaaaaaaaaaaaaaaaaagttactgtaaagaacaatattgagtaaagaatagtgcaggtggtggtatgtgagtatggcaaaattttaagggtgggatatgaacaaccaaagtttcaaaacattgcctgtgccctatggtgcctgcctaagacctcagacagcaatagggagcccagaatacggggatccacccttcaggagagaggggccactggaatttggtctttgtcccccagcagttgacccgtcttctctgttctaaattctgccaaggaagcagctgaaagagacttcctcagcgcctagcgctgggagaggagagggtctctcgatgcctctacactgcctcagctgtcctgagactgagatgggccagttgtcctgaggttgatgcttggtgtgggtataagccccaggcacggccacccccacccccaggcccagtggcatctactctgagcagatcctgctgggtactcctggcagccagctgtggcccgtgaactgacttctaccgtctgtgaagcctcagaccctcgctgcatgccctatagccttgagtcgcagccagagagccagccctgcttgttgtcttggaggccagtgctactggagagattgtgtctttgcttggcctggaaccagatgtttggaggctttatttagcctctcaactctgtggaggaccaggcctgagctggccacgccttatctctagacattgttcctaccagagtgacctgacgtctttggtttggcggcttcaagctgccacactgtcagcctagcagattgtgcaggatgctgaggataaacgaacccaccaggactgcatttcacaagttctggctgggaggaagtgaggacaggcagcttcccggtgctggagacaggtaggcagcgtggcagaggctgtgggacctggaactctttagagaactcgctccggagcattctaggcacgtgggcacctctccttcaccttcgtattcccagtgcctggctcccggtgggaatgggtgagtgagtggtgagcctggtttttgatgagacaagagacgccctgcaaagactgaagaaacaatgtgaatttcctcatggctctaaactgggaattgtggagtctgaggaaagctggaaaagatgggagatggaacaggccttcctttggtggtgactgagcaacgggtctcctgttagccaagtgcaccgaggctaatttcccatccgtacgctctccaacgcctttgctccaatctcagccaaaactgcagcgtgaacggggcccagagcaggactcttggggctgactgttgcctcttgagggagggtcttcctgagttgtcttcccatcagaaccagcctttcaagagtggactatgaatggaagtcttgaggggaggatcttgcagaaatgggcgattacagggcttccagggtctatgctcgtgccaggggggatgaagcttgtttgtggctggggctgcaaatccctttcttccccccatcctagtccaaccagctctacagttacagctcacggtgtggcatttgctaaaccctcaggcaaaaccttggttggcagggaacaggagggagtgctagcccccagcacaggggatgagttcccatttgtcaaggctgggaagcagcaggaagacccctgagggtctgacctggaggggctggagctgggggctgttccaggctctgatcttgtcccccggggctacgtgtgctggaggctgtgcaggcctctggcagtcccgactctcggtgcctcaggaagatgataacacctgccaggttttgagactccggtgaattgaaccacaaagatagctaagctcagttcctggaatttgtgaagccgccaataagtaactattgcccttgcctgaagcgtggggtctgtcttgcttttctaatgctgctgaaacaaatcgccacaaacttaagggcttaaaaccacacaaatttattctcttatacagaaatctaaaaaggatctcggcccggctccatggctcacacctgtaatcccagcactttgggaggccgaggcgggcgcatcacctgaggtcaggagtttgagacgagcctggccaacatggtgaaaccccatctctactaaaaatacaaaaattagtgggtgtgatggtggacgcctgtaatcccaggtactcgggaggctgaggcaggagaatcgcttgaacctgggaggcagaggttgcagtgagctgagatcatgccattgcactccagccctgggcgacagagggagactttgtctcaataagtaaatacataaataaatagattaattaaaataaaaaggatctccagggctgcattgcttctggaagctctagggcaagcttttccagcctgcggccatacggcccaggactgctttgaatgtggcccgacacaaatttgtaaactcttaaaacattatatatttttcttttagttcatctgctgtcgttagtgttattgtattttatgtgtggcccaagacagtcgtcttcttccagtgtggctcaggggagccaaaagatcggaagcccctgctctaggggagtgagttcattttattgccatttccagcttccaaaggctctctgcattccttagctcgtggccccatcctctgtcttcaaacctaccagtgtagcatcttccaagcagtccctcaccactaccctgtctccccggccctctcactccccttctgtggccacgatgcctcagggaaagatggcattttaggcagcaggtaaagaacgaaccgaaagctagagacctttgaagatgaggaggctggttctcctgcgtgtgggggagactgagcgatgtcctggctgtgggaaagactggaagggtagggacgggcatccgggccactgcaggtggctcataaaggatatggtgggccccatgtcccagtctagggccgaatctttacttgttttttaaatgtctttccggcagggtgcggtggctcacacctgtaatcccagcactttgggaggccaaggcgggcggatcacgaggtcaggagatcgagaccatcctggctaacacggtgaaatcccggctctactaaaaatacaaaaagttagctgggcgtggtggcgggagcctgtagtcccagctactcgggaggctgaggcaggagaatggcgtgaacccgggaggcggagcttgcagtgagccgagatcgcgccactgcactctagcctgggcgacagagcgagactccgtctctaaaaaaaaaaaaaaaagaaaaaataaatgtctttcccactagagtctaagccacttgagaacaggggccactgtctgtttcccatggtatctatagggcctggtggacattcagtaaatatttattgaatgaataaataaatggacacatagcccagtggaatccccaagtactcgcgttttgcggtattcatactcggtccttggcaagcatcgggcaaggtggcactcttaggagttgaatccagctctggtgtgtgggacaggcaggaggagaggaagagagggaggaaaagtcggttcgagaacccaggtggaaaatagattgagggaagcaaaacgagatgttacaggaggaatatgggtgattgtcttttccttttatatttctgcatgttttgtatattttttataataatatctgacttttatcccctatgaaagtgtcgcttaaaataaaaggaaaggggaaaggggggccgggcgcggtggctcacgcctgtaatcccagcactttgggaggctgaggcggacggatcacctgaggtcaggagttctataccagcctggccaacatggtgaaaccccatctctactaaaaatacaaaaaaaattagtctggcataatggctgggcatggtggctcacacctgtaatcccagcactttgggaggctgaggtgggtggatcacctgaggtcaggagttctatatcagcctggccaacatggtgaaaccccatctctactaaaaatacaaaaattatctgggcatggtggcaggtgcctgtaatcccagctactcgggaggctgaggcaggggaatcactggaacccgggaggcggaggttgcagtgagccgagattgtgccactttacttcagcctaggtgacagagcgagacttcgtctcaaaaaaaaaataaaggtcgggggggaagggcagggaagcagaccgtccacgcagggttttggcctccttgctcatgagctgttggctgtgctttgcgtttgtgcaggtggaagcagggaaaggcctggagatgaggaagctggttctctcggggttcttggccagcgaagagatctacattaaccagctggaagccctgttgctggtgagtacagtccctgctctggggccttccggtccccccgcccgtgttgggtgatgtcatgctctgaagctgcttttggagttggagaggaaaggggaccgtacccgtccctccctgtggacagagtctgcagctggtctgcttctggctgggcatcgggcagcccgggtcattgccagaaagggcctgtgcctctcagctccagctctcaaaaggcaggagaagcacacccggcttagagatggcaaacacacctgtcacccacgaccctggcatagggcatcgtgaacccatcatggtgctctgcctgcctgggcgggggccgagcgccttctccacgctgtgctctgggcagtcattcccaatcaatccagttaagaagtctctgccgtcttgtgtccaagtccttctacctccctgggtgagggaaccgttagtgccatcctgaggccccgtgtcaggaaatatgaggtgggaggctgtgttctttttttttttttttttttttttaagacggagctttgctcttgtcacccaggctggagtgcagtggtgcgatctcggctcactgcaacctctgcctcccgggttcaagtgattctcctgcctcagcctcccgagtggctggaattgcacgtgcacgccaccagtcctggctaatttttgtatttagtagagacaggattttatcatgttggccaggctggtttccaactcctgacctcaggtgatctgcccgccttggcctcccaaagtgctgggattacaggcatgagccactgcgcccggcctgtctgtgttcttttgagaagcggcacagctctgaggcatcaggccaagctcagccctcggtaacatgcctcagttcccctcccagatggaggcatcgttgtgagagtctgattgggaggggaatatgaaaatgttttcggaagataaaagtactacacagatgtgaggtggttttgccttggaagaaagtgctccttagatgtgtctggatgttatgcagagtgatcgtggcgtgtcaatctttcttttgggtattttgcagcctgagacataaggtaattgtcagaaaagggagacgcagaagtgtggatctgtggaagctcattcttaacaagaattctaagatgcacatttaagtacttgccatgacgtgaggtgttgtcacacgtcaaccctgagatgctgtcagtgtcccaggggacttgacatttatgttacccaggaatgactgtgtaaatgtgcaggtgcaggccgggcgccgtggctcagtgcctgtaatcccagcactttgggagccccaggtgggcagatcacttgaggacaggagttcgagaccagcctggccaatgtggtgaaaccttgtctctgctagaaatgcaaaaaaaagccaggcgtggtggtgcatacctgtaatcccagttactcaggaggctgaggcatgagaattgcttgaatctgggggcgaaggtcgtagtgagctgagagtgcgccactgtactccagactggacgacggaagtgaaattcctcaaaaaaaaaggctgggtgcagtggctgacacctgtaatcccagcactttgggaggccgaggtgggtggatcacctgaggtcaggagttcgagaccagcctggccaacatggtgaagccccatctctactaaaaatacaaaaaattagctgggcgtggtggcgggcccctgtaatcccagctactcaggaggctgaggcaggagaatcgcttgaacccgggaggtggaggttgcagtgagccgagtttgcaccattgcactccagccggggcaacaagagtgaaactctgaatgtgcagctgttttgccacacgccaggctgagtacgtcccatctctccaggagtttatctgtgtgtacggagctgttttccaagtgaggggcagtgtggcaggtagctgagggtcctggtctggggccagagctagggcaagacttggccctgccattaagagcaggcgtattgcactgtttctcaaactgtgcctctcagcccatcagtgctttgggttgtgaaatcagtacagtgggttgtgaaaccagtacagtgggttgaaccagcatttttaaaccaatgaaaaaatgtcagcatgcatcatacacgggaaagataagtgagggaactttcggtttgttgtctgtctgtgtgcctgtatatatatgtaattgccgggcccatggtgtcttacacctgttgtgggtttgaaaactgctggctttggccgggcgccgtgtctcaagcctgtaatcccagcactttgggaggctgaggtgggcggatcacaaggtcaggagatccagaccatccttggccaacacggtgaaaccccgtctctactaaaaaagtacaaaaaaaattagccgggcgtggtggcgagcacctgtagtcccagccactcgggaggctgaggcaggagaatggcgtcaacctgggaggcggagcttgcagtgagcagagattgcgccactgcactccagcctgggcgacacagtgagactccatcacaaaaaaaaaaaaaaagaaaagaaaactgctggctttgggcaagccctacataaattccttgagcctccatttctggatctgaagatgagagggatgccattctttctctctctttccatggggttgagaagatcgggagatgctttcgggacctcatacagcgttgagttacttaagacactcaactgttagtggaagaaaggaggacaggcaaagagacaacccgtcagacattcgtgaaacacgtcttccaaaccgtgaattgctgtccaaaaaggaacatagttgtcattactaacagggtgtgtatttgaaaggagttcagacagaggatctagactgcctggccgtactggctccaggctttcagcaggtgaatgagctatcgtgcctcagtttttccatctgcaaactgggtatacaaatagtatgcttttcatggggtcgttgtgaggattaaaggaatttatacacagagttctttttttttttttttttttgagacggagtcttgctctgttgcccaggctggagtgcagtggcacaatctcggctcattataacctccgcctcctgggttcaagccattctcctgtgtcagcttcccaagtagctgagattacaggcacccaccaccacgcccagctaatttttgtatttttagtagagatgagatttcaccatgttggccaggctggtcttgaactcctgacctcaagtgatccgcccgcctcggcctcccaaagtgctgggattacagatgtgagccactgtgtccggcacataaagctcttagaacacagcctgagtgttcgttgacactgttaatttctctattgctgggagaggagacaggttagggcttcgtggtttctgccacaacacacccgttccctgaaggagggagtggcgcctgtccccatcagacacggagcccttagatcccacctgccacccacgagcctcttcctctgggccaagaccaagagcccctccctgctctgcctttctaacagctcatgccccaaaggcagaatctgtggggcaggggcccccttcctgatatgcctggcgcaggttccccccttccccagctgtctcctcccggggcaggttccccccttccccggctctctcctccccgggcaggttccccccttccccagctctctcccggggcaggtttccccccttccccagctgtctcctcctggggcaggttcccccattccccagctctctcctggggcaggtttccccccttccccagctctctcctcccggggcaggttcccccacttcccccagctctctccacccggggcaggttccccccttccccagctctctcctcccggggcaggttcccccccttccccagctctctcctcccggggcgggttccccaccttcccccagctctctcctcctgggcccctgcttggctctttcttgagcagagaccagagggagcaaaggaagaactcgctgggaggccaggtctgtggtaggagggctcaggaagaggagtaggaccctccacagccacagcctcagaagaaaacctcagagtgaaagaatcacacccttcctcctctcctccctgagctgggaacccctgcaccctccccacccctcagctaggaggaagctaaaccttctgctcttcggggtggcctcgcaaaggtgccagcttgaaggagaagaaattcgttccctccatgctcgctttcccactcctgaccccattcccaccgctctgccccagcctgtttgctttcatctgaacacttcctgatatgcaaagggctgggtgtgtgtacctaaaaccatgtgcacacacggggcagacgagcctccacacagaagcctccgtcctggcctctggggtgcttgtgggggtcatcttctggggccctcctgcttcctggtgggctctgattacaggaaaagcctgggagcctgggccgaagtagggggtgaaggaaaaaagatgaagccaactgcattgaaattctggatctccttgacactgggaactgagcttgggaactgtgtcttgctacgctggggccacagggtgaggccactccccagagcccctcccaccgctggccacgactggccctcctggggtggactcctggccacgctgcatcgcaggctctttatctataaaacaggtgaatgaggccttcctccctgggctccagtgacgagtgactcgggtggcatggcagcaagcatgccaggccttctggggcaggaggtggaggaagtgggtacatttctttcccttatttcgaaaggccggtcgctgggggacagagctgacaaacggctatgtgaagtcccactggcaagtgagaaccggcccaggcccgtcttcctgagaagcagctggtatgggagccagggttgaagtcactcacgggtcctctccgagaactcgagtggtgaaatggagagccggggcctgcccttgtccctgcagcaggactggggaggagggggtgcctgagtggtgtgctagcgctttggcagaatggctgtgccgtgccgaagctcagtgtgggtcaccttgcctttcagtccaccctcctgcccctgagcccatacgcaggacttcaccagagacaaataacggcctcgagggtcctggccagccaagggcacacacccagccctgtcccctccccgcgagtgaaatcaggagtaacagccaaggtccccatcgtgtcatgagaaccatctgatgccccaagcgcaggccccgtccttgtgactggctgtgggtgagcgtccatttcttccccttttgcagacggggtgggaagttgaggaggaagcataaccattgtgttttgtcttcgtgtgggtggcagatgagcgcgtcgcggcttctgagaaatcccgtctccttggccttcctgggactgctgaccttcctgcttcccttatttccccctcagtggggactgcgccaaggcggggacaagaattcttgggtatggggattctgtggcgactctgcgggctcctccgtggggtcctgcgttgaggtgaaaaggataaactcttacgacgatgtcaatcctgaagctagttccatgtccctcatggagggtggggagtccccaaagctttcagctcacccacctgggcttggggggacactcttcccttgctcctgcctcccggtgccttctgtttccctgtctggcatgcctctctacgcccccactcctccacctgctcagctctccaaggacctggtatgtgtgcctcctccatgcagccctccaggctactccagcacaaccttggaaccatgtggttggtgcttacagtcagtcgcatcgtccatagtcatttcatctgtgttggcccattttgcccaactggattataaaggtctcagccaggcatggtggctcaacacctgtcatcccagcacttcaagaggccgaggcacgtggatcacttgaagtcaggagtttgagaccagcctgaccaatatggtgaaaccccatatctacaaaaactacaaaaactagctgggcggggtggtggacacctgtaattccagctactcaggaggctgaggcaggagaatcgcttgaacctgggaggcggaggttgcagtgagccgagattgcactattgcactccagcctgggtgacagagtgagactctgtctcaaaaaaaaaaaaaaaaaattgcagtctgggaccatgatcgtgtacgcactgacgggaatgccagtaggtagcgcatggctgtattatcccagtttcacacatgaggctgctggtgacacgaagcccagggatgctgagtgatgtgcgcacagcagagctgcgactcaagcccaccctgcctggcctgcaccaggtggaaccccatgcgcttgcctagcaaggaccagacaccgaggggccgttggttctaggacggcgagggtcagaaggagaggcctgaccggacgcagaggggccgttggttctaggacggtgagggtcagaaggaggggcctgaccggacaccgaggggccattgattctagcacagcgagggtcagaaggagagtcctgactggacactgaggggccgttgtttctagcgcggcgagggtcagaaggagggtcctgctttgtcctgcatggattgttggatctgggctttttagagctcggaggatgaaggagccagaaggcagagcaccatctgggtgtctgagtagatgagacgacttcttccagtgaacatgggttctgtctccatcagagtgaggcgatatatctgagtagatgagacttcatcagaatgaggtgatgtgaggctggagtgaggctgggctgggagtttgccgtggttggctggagctggtggtcgtcgttcagagggagctggcgctggctttggtgttcccttcagtgcagcattttcagcagtggagtcacccattctctgctagaatgcttctcttgtcggaaagctcactacttaatcctatgggggacagctctagtgagcccgaatctgaccccataacttttccccactgttcctgggtctgcagagcaacgtagattaagtctaagcctcgtttttgtttttggagacagagtctggctctgtcacccaggctggagtgcagtggcgcaatcttggctcactgcaacctctgcctcctgagttcaagagattctcctgcctcagcctcctgagtagctgggattacaggtgtgcaccaccacgcccagctaatttttgtagttttagtagagacggggtttcaccatgttggtcagacttgtctcgaactcctggcctcaggtgatctacctgcctcggcctcccaaagtgctaggatgacaggtgtgagccaccgtgaccagccaagtctaagcctctttccacgtggccttcaggtaggtgaagaacatcaacagaatccgacatggctggccgggcgcggtggctcacgcccgtaatcccagcactttgggaggccgaggtgggtggatcacgaggtcaggagatcaagaccatcctggctaacacagtgaaaccccgtctctactaaaaatacaaaaaaaattagccaggcgtggtggcgggcgcctgtagtccctgttacttgggaggctgaggcaggagaatggcgtgaacccgggaggcggagccgagatcgcaccactgcactccagcctgggcgacagagcgagactccgtctccaaaaaaaaaagaattcgacgtggctgctctccctctggccaccctgcccttccctgccacaccttccctgtatggcaggttatcaggccctgtgtcctgcagggcctttgcagtacagcctggtcatctttggtttttttttttctgattattcatattcattcattgtaggtgatttataaaatgcagagaaccacactgaggaaatgcctgcacgtcccgttatcccacggtcccactgctaggctggaaggtgatggcatcagctcccggccagtgctgggggttggtctgtgttatctgccacctcaccgtctacactggcaggccctggagcatcttggtatagacaggcaggcattgagaaagagtctgagactggagacccctgccatgcgcagtgggaaggaccatcacggtcgcttagcaatgtctgccacgggggtgggctgcagtgggggacacgtgaacgcccatgcctctccctgtgccaagtgacgggaacttggaacatcagtgaggccaagactggtcttgagtaacttcgggtccctaccttctgagtcctagaaccacattctgtttcttggaaggaaacagctataggcttgagttccctgtcaaccctcccttccactgaagtgtgacaaggagcttatgactcggggcacaggctatcgtggaagaaagacgcggatcctgttaacccagtacaggctgctgctgagctcagctgcgtggtaggggagtgagcccaggcaccacccctcgggcctggcacagctgccaggccaggttcctgctgtcgagtgtgcggcttgttggggcctgtggcagtggctccttgatacaaagctcgtttcagtgccctgcctttggcagccttgtctgggcaggacttgggcagcgggaagggctaacgatcggccccggggcctgccgacactctggtttgtttacccccgacctctgctctttcttcctctgtttctcccagcccatgaaacccctgaaggccaccgccaccacctcccagcccgtgctcaccatccagcagatcgagaccatcttctacaagatccaggacatctatgagatccacaaggagttctatgacaacctgtgccccaaggtgcaacagtgggacagccaggtcaccatgggccacctcttccagaagctggtgagtctgccagggatggagggtcctcacgcagggcctcagtggagcccatagtgttgcaggagcctcaggagaggaccgggcagccctctcggactccttgaaggcctgagacctctccgagtccgggaggaaggcctgggcctgtgtgttatggggtgcctggggccggggccttgactctaggcctcccctggtgcagccctgggagcttctggggtggtggagacaggctgtgtggataggtccttccaggggtggtggagatgggctgtgtggatgggcacttctgtgggagcaccatctctctcccggagggtgctccttctccctcccggagggtgctccgtctttcccggacggtgctccctctctctcccggagggtgctctgaggaaccagccctggaatgaaggcttcttgctgggcttcagtctcctgtccctcagtgaacagaggggcacatgccgggttaggggcatgaggactgctcccctgagacctcgggtctgtaaaaggaagcagttgggcacactggccgatgatcctctcctgaggtcccaagagcaggaagcactgaagcccagccctgctcaccactgcagggtcgggagcggcaggagtgggtgggttaacatgcagacctcgtgttgggaaacgttcacagaagtcttctggttccctgtgcttctgtgacaccctctcccccagctctgccccatctctggctgtgtcccctggaggacccccaggtcagactcatggagctccctccccacctctgctacgtaacgtctgaccgcccagcaggcaagagggagactgggagtccaggccgcggttcttctctgggtgtgagtggccagaggaccttctcctccttcctgccctgttctctgggtgtgagaggctggaggcctcctcccctcccctgccgtgttctggctgaatggacagggctctgcctttctcacgctggagaagactctccctctcctgcctggacactcctaggacctctagctgagtgtgttcagagctgagctccctgcctccggcgtcacctgctccgcttcctgtctttacctcaccgagtgcttcagactctttctggctgcaccccctcccccacctgtcctgtggactccactttttggccgttgctcacagccgccttttcctcttcttggccacccatggccctcacctggacagctgcgtatcctcctgtgtggctcctgcctccaggcccactcacctcccacccccacctctccttagaggggagagagtcactgaaacctcgacggccccttcagcggatccccacggccctcggatgaaggtcaggctccgaggaatggctcgagagaccctttgcacactgacccgtgtccagccccagccttggcagcttcctccccgcacctctgtgctcctgacactggactttctgttctcagttcccagggcaggcactttcttaactcttggtacttgaggccccgtgtgcctgaaacgtccttccccctctcgtctggcctcccctggtcagttcccagcttagaagggacctcctccaagaaggctttccaagtcgccaaatgcaggccttgtgccagtcctcgtagtgagcactagtaactgcctgactcccccaaaccacaagttccaggaggacggactgcatttcctttttttgttgagacggagtctcactcctgtcgcccaggctggagtgcagtggcgtgatctcggctcactgcaacctcctcctcgcgggttcaagtgattctcctgcctcagcatcccgagtagctgggattacaggcgcccaccatcacacccggctaatttttgtatttttagtagagacggggtttcgccatgtcggccaggctggtctcgaactcctgacctcaggtgatccgcccgcctcggcctcccgaagtgctgggattacaggcgtgagccaccgcgcccggcctgcatttccttcttcttagactcccagaaccagcccagtggtcactgcttgaatgagtgaatgcaccgtgaccttgaccactgggcctcgggagaactcggaagggcatggagggagacgttgcagggcctgagatttctgtcctgagagtcctgtttctccagcacagcttctagagccgtgtcacaaagtgggcttgaatcccagcgctgccagattaaacctgcaactgggcaacttacccaaccgctctgaatcagcttcctcatctgtaaaaaacaggatagtaacagtatttacctcattgggtgattttgaggagttaatatctgaaaactgcatggggctgagtgtggtggctgacgcctgtaatcccagcactttgggaggctgaggctggaagatcacttgaggcttagagttcaagaccagcctgggcaacatagcaagaccctatctctacaaagaaatagaataggcctgactgagcgtggtggctcacgcctgtaatcccagcactttgggaggccggggtgggtggatcgtgaggtcaggagttcgagaccagcctggcctacatggtggaaccccatctctactaaaaatacaaaaaaattagcagggtgtggtggaatgcacctgtagtcccagctactcagggggctgaggcgggagaatcgcttgaacctgggaggcagaggttgcagtgagccaaaaccacaccattgcactccagcctggatgacagactgagactctgtctcaaaaaaaaaaaaaaaaaaaaatggctgggcacagtggctcacgcttataatcccagcaacactttgggaggccaaggtgggcggatcacctgaggtcaggagttcaagaccagcttggccaacatggtgaaaccccgtttctactaaaaatacaaaaattagccgggcatgataacacgcacctgtgatcccagctactactcgggaggctgaggtgggagaatcgcttgaactcgggaggcagaggttgtagtgagccgagatcgtgccactccactccagcctgggcgacaagagcaagactctgtctcaaaaaaagaaatagaatacaataaagtaaaagaaaaagtgcttggaacagggcctggaacatcataaattaataagtactcaataactggtcattatcatcagtgccattattattattattattattattattattattattattattaaattgggaagaggcaccctggaaggtatccttccaagggaatgccacactctggttctagcatacccccccctgctccctccggttcagggatggtgaacacctgtcatcactgcctgctcacctgagctgagtggcctggggggcatcctctcctcatccctcaggagggtagaggagagcaaacctagggttgctggaaacgctgtcacagtttatctttgtcacttggacctggctgtccccggttctggtcttggctccacaggcctggccgtgaatctgctacccaccactttccctccccagcatcgtgaaccgatgcctgaggcccctggggctgcagatttgggagggcccggggggagccgggtcaggtctggcatccggaggtggtttattttcagccgaagactctgggtatttgattattcgttactgagagaagggaattagcgtctctgctgtttgttttatgagatcactccagtgccaggctgctgtttccaggcaacctgcacttcccagttaatgaacctgccaagccaggcctcgggccctaccgcctggggtgactgtggcagcggcagtccctgagattaccgtgaccctggacgcaggcctccgcacggctggctcctgcccctggctcctgggagggtggtgtgccaacccgggcctccaggctttctccttcttgtgggaaagggggcaagaggagccttttcctggaagaatatcggtgatctgactttggcttaggcagcgactgtctagtatgcctcgtgtagcgtgggcattgatgggccgggcctcagtactccctggaaaaggaaataaactccctcccgtccggccccgcccccttttaaggtcaggccccaccccctttaaaactcaggccccgccctcttttaaaagtccggccctgcccccttttaaagtcctgcccttctgcagctgagacctgaatgcctctggccttggcgtcacgccgggcgtccccactcgcgctcccctctggcttttccagatgccccccgctcccctgccccaccagcttcctcaaagggctctgcctctgtactgggaggctccaggctcagccgatgctgcggccagcctgcccccacccctacccccaccccagcctctctgggtccttggggagcatgaggatcctgcagaaagcagagtggtccggggtgggggtccacagcagcccacttcccccagcaccttggtgggaagcagaggcccctgaggaagccaggcagcagctgtatcccccttgctgctgtattgaaaaacatttaaaccagaaactccaaagaataacagcagaaccttctaatgaagaaaatacagcgtcacacatgaaggtggagtctcccctccctcctccctcttgaagcagctactggcatgaatttggtggatagccttccagactgcagtttgtgtgtttactacatatctgtatctattttgggttggcctgtactttaaaaaaaaaaaaaggtcttgctatgttgtccaggctggacttgaactcgggctcaagtgatcctcccacctcagtctcccaagtagcgagggctataggtgtgtgtaccacagctcccagctgcatgtactttaaaaatgtgtctaagccaggcgtggtggctcacgcccgtaatcccagcactttgggaggcggaggcgggtggatcacctgaggtcaggagttcaagaccagcctgaccaatatgacgaaaccctgtctctactaaaaatacaaaaactagccgggtgtggtggtgcgtgcctgtagtcccagttagtcaggaggctgaggcaggagaatcacttgaacccaggaggcggagtttgcagtgagccaagatcgtgccagtgcactccggcctggttgacagagcgagactccatctcaaaaaaaaaaaaaaaagtgtataagtatacacatatatcatattttacagttcaacccatgttcgttttggagcttgtcagcaatcgtattttacagttcaacccatgttcgttttggagcttgtcagcaatgctatgtgtaaatcgggtgcatccatgttcatggctgtgtgcgcggcttcccccgtttgtgagcatttgttaccagtccctccactatgaggaggaaaagtgagatggtgaacacccttgagtcccctggggcacacacataggccatttgctccagagcactgctgtctaatggaaatagcttatgagccacgtacatcatttcacattttctaatacccaccttttttttgtttttttgagacggggtcttgctcttgtcacccaggctggagtgcagtgatgcaatctgggctcactgcaacctccacctcctgggttcaagcgattctcctgccttgtcctcccaagtagctgggactacagatgcgtgccaccacgcccggataattttgtatctttagtggagacagggtttcaccattttggccaggctggtctcgaactgccaaccttaggtgatctgcccgcctcggcctcccaaagtgctgggattacagttgtgagccaccgcgcctggcccctaatacccacatttttaaaagtaaaaataggcaggtgaaattaattttgagaatatcttttatttattcccgcagatccaaatattatttgaacatgtaatcagtatttaaaaattaacgaggtaatttacattctcttttacatactaaggctttggaacccactgtgtattttacatgtccggcacgtctcagtttgaaccggccgtatctcaggtgcttggtagcctcaggtagctggtggcgactgcactgaacgatacggctctgcagtttgtatgtaaaagtggatttgctaagcaatcgatgggctgtgcctatccacactgttattagttcaactgaaaataggccatgcctattctcagctttattagttattaacaaattgctctccaaataattgtactaatttacacttccccgagtagtctaagagtttaaattggccgggcgcggtggctcacgcctgtaatcccagcactttgggaggccgaggcgggtggatcacgaggtcaggagatcgacaccatcctggctaacatggtgaaaccccgtctctactaaaaaaaaatacaaaaaattagcctggcgtggtggcgggcgcctgtagtcccaaccactcaggaggctgaggcaggagaatggcgcgaacctgggaggtggagcttgtagtgagccgagatggcatcactgcattccagcctgggtgacagagcgagactccatctcaaaaaaaaaaaaaaaaaaaagttttaattggccgggcgcagtggctcacacctgtaatcccagcactttgggaggccgaggcaggtggatcacctgaggttgggagtttgagaccagcctgaccaatatggagaaacgccgtctctactaaaaatacaagattagccaggcgtggtggcgggcgcctgtaacgccagctactcgggaggctgaggcaggagaatcccttgaatccgggaggttgcggtgagccgagatcgcaccactgtactgcagcctgggcaacaagagcgaaactccatctcaaaacaaaaacaaaaacagggagtttaaatttccccatatgcttgccagccgttgctgtcaattagacttttaaattttgacccttctgatgagtataaaatatctcgtgatggctttaatttgaatttctaccctttggtcccttaagaggaagtgcttatatacagcgcagcgaagcctttccataaatatttggggaattgacttatggagcctcggtttccccttttgcagaaaggggcgatggggtctgccctgcctctcagaagaggcgaggctctgtgtggttgtgactcaggttgtgactgtgtgagtgacaggcaaacgtgtagtgaggctggggctttggctccttggaggtagaggaggtggaagaggtgaggacggggcctcaaggccaagggaaatggaaagacagcatcttcatttgttgttttgttttctttttgagacggagtcttactctgtcacccaggctggagtgcagtgacacgatcttggttcactgcagcctccacctcttgggttcaagcgattctcctgcctcattctcctgagtacctgggattacaggcacgcgccaccatgcccagctaatttttgtatttttagtagagacggggtttcgccatgttggccaggctggtctggaactcctgacctcaggcctcccaaagtgctggggttacaggcgtgagccgccacgcccggccaagacagcacctttaaatgtcgttccccacgctgcacgtggggagggaggcctgagcaggccacacgtgccagctccccccagcacacacacccccctctctccctgctccggctaattccaggatgtgaaggaagtatgagacattaagggatttcaaaccctgggagaccttcaccgtgctgaggaaagctggatgctgtgaagagttgaatttctagcaggccaacaaaggccctagcctggtctccccaaccccagaccccctcattaaccttattggctgagctggtttccatggaaactgtccagttcaaagggacactgtaatatgttcatccctgcgtttccccaagttcccaacgagctgagtgagaggttttcagtgcaggggagctcccggtgctccgtgaagctttcatccattcattaatcctctcccctcccaccctcctctccctctgttccctgactcctccctgcaggccagccagctcggtgtgtacaaagcgtttgtcgataactataaagtcgctctggagacagctgagaagtgcagccagtccaacaaccagttccagaagatctcagaggtaggccgctccccacatagccaccctgagggacaaggagctttgggggctgctcagagcccttggtctcccctccctcgcttgccagtcggtgaagtggttactctaatgggtaacacttagcctgatatttgctttcttgcacctgacattttccctcttaatagaaaacgatctattttatttatttttttattattctctttcagattagagagaggaacaggggaggcaaaaaaaaaaaaaaaaaaaaaaaatccaaggcagtgttctcccacaccacactatggtgaccttgagcaagtcacgtcccccctcttggcttttatgtcctgtccggtagaatgaggggtttagaaatggccagataatccttttttttttttttttttttttgagacagagtcttgctctgtcgcccaggctggagtgcagtggcgcggtctcggctcactgcaacctctaccccctgggttcaagtgattctcctgcctcagcctcccaagtagctgggattacaggcgcacaccaccacgcctggctaaggtttgtatttttagtagagatgaggttttgccgtgttggccaggctggtctcgaactcgggtgatgtgcccgtctcagcctcccaaagtgctgacattacaggtgcgagccactgagtccagcttggccagctaatcctgaccttgcttgataagaatcactggggcattgtttaaaacacagatttcctggcaccttccccggagcttctgattcagaaggctttgcgtggggcccaagattctatatttgaacaagcttctgggtaatatttatgacagggaagtcttgaggaaatttggactataggtcgtcttttaaggttcttgccaactctaagactgccatcccataaacacaaaaagggtaagagccacttatgtggagaaggagccttagaatccctggccgggaacacgcgtgcttctgctcctgaggcccagccttcctggccaggaacacgcgtgcttctgctcctgaggcccagcctacctggccgggagcacacgtgcttctgctcctgaggcccagccttcctggctgggaacacgcgtgcttctgctcctgaggcccagccttcctcccgcactcctccacagggcagaggtgcagtcctatctgccatcaacatttctacctaagaggtggcatggagggacagttgcttaggatccttcaggacagagcccagttcatccctttgtccaaaaagacctcagtggcacccctgaagcactggcctgagaggaacagcccccagctcagggcaagagaacctccatcctagaaaaggggagaagcttctgcagttttgggagtcctgccgtaaaggcccctcttggccctttgtgttcccgtctcagctctaacgctagaagagttggggaaacgcagggtagttttcctgaaacttcaggggtgacggtcgatgcccacgtttagaatccaccgagaggcagcagagaagctgacagttggagatgaacatgtcaccttcattactgttaaaaaaatgcagcttggaaaatgtggatttggatctgtagccacagtgggcttgctgacacttcgcctctggaatgaaacgtacctatagaagccgggcgtggcggctcacacctgtcatcccagcactttgggaggccgaggcgggcggatcacctgaggtcaggagtttgagaccagcctggccaacgtggcgaaacgccgtctctactaaagatacaaaaattagccgggcgtggtggtgcacacttgtaatcccagctatttgggaggctgagacaggagaatctcttgaacccgggaggtggaggttgcagtgagctgcgatcacgccactgcactccagtctggtgacagagcgagaccctgtctggaaaaaaaaaagtatctattgagtcccttgcaggaataggaaaacacaggcccctctccacaatgaggacagagcccacgcctcttacccagtgtgcagagagaggatggctgaccatagtttcttctcccagacccatggagcagatgtgtcaccctctgcctgggaggacgaagtgcagggtggggaagtccctctccatggagtcaagtggctggagaggccaggtgcagtggctcacgcctgtaatcccagcactttgggaggccgaggcgggagattggcttgagcccaggagttcaagaccggcctgggaaacatggtgaaaccccgtctctattaaaaatacaaataaaaggggctggagaaatggtgctttccctgcggtttccagcccaacccaggaactacctggactcccctggtctgtgttcagatcagccctgccaaggccgcccaagatcccggggtcagacatggtgcagagagtgtggggtcttctcttggcctgggctgattgcctgttctctgtgcctaggcagaaacccccacacccaaccataagcccctcacagcctgcccaccctggagggcagagccaggcccctggctttctgccaggtggcttctcatcctgactcactcgatgacgtgcttgcttcctgctgaggctgccacttaattactgcaattaggctcctctctgcagcaggagtgatttcataccctagacttcactggagggggcgtgaggaaacattcccgaaatctgggagtccaggcaccagccagagacacaggctggggacgctgagtatcccccacccccccgccccccaaaatatacacacacccaagctccatctccaggagttttctctgtctagaaacagcttgagacagaagtaggaagttcctgctgtctgagcgcttcctcccctgcagaccaagcaggtggcatcacctcggcagctgaccttggcctcatcacctgggcagctgaccttggcctcatcacctgggcacctgaccctggcctcatcacctgggcacctgaccgtggcctcaccttgcctcctgccttccctcccacacccctctttgaggctccgtgtgctccgtctgccaagtggggatggtattacagctccagttgcaggctgcactgtcctgttagcaaaagctggggctggaacgtctctaaaggaggataaagaggcttggagcagatgagtcatcccgggggtctttccagtactcactacctgctgcctggcttgggatccaggaggggcattggctgttcctccctcgaagcttcctctcggacccccagcatgggcagtggtgggtggggagtgtcgggggtgctgggggctgagtaagtgctctctgatgggggtaggatgcagctcactgtcctggggagctcagcatctctgccgaaggtccaccacttccctgctggcgtgtgggacccttccttcctacctcatgggttcctcatgccctaaagattggctggagtacctggcgctggtcaactcaaaccctgtctgcccttggccgacgtgtagggttcctgagtcggggttcctgtaatcacagggctccctgccagcctctctcatctctgggacctggagtcccttccttcttgcccacgccccagccactggactccacgaggctccaggagttcacaggtgtggtgcaggggattggggtggcagaggcagcccatggccatggggctcctttgtctttctttttttttttttttttttttttttttttttttttttttgagacagagtctcgccctgttgcccaggctggagtgcaatggtgtgatcttggctcactgcaacctccgcctcccaggttcaagcgattctcctgccccagcctcccaagtagctgggattacaggcacctgacaccacacctggctaacttttgtatttttagtagagatggggtttcaccgtgttgaccaggctggtctcgaacttccgacctcaggtgatccgcccaccacggcctctcaaagtgctgggatgactggcgtgagccgccacacccggcctctgttctcatatgtacaccctgagtttcagaactccccttcttgccaggctcacagtgggggctgggagaggtgagggacagaacaggccatgactcctctcctccctttggcaggaactcaaagtgaaaggtcccaaggactccaaggacagccacacgtctgtcaccatggaaggtacctcggggagcgggctggattacaggcacctacctttgtctggctgtgcaggcaacaggctgcgtgaacgcggcgcccttccccttgtgtgtgcgtgtgtgtgagcgcgtgtgagcgtgagcgtgtgtgagcgcgtgtgagtgtgagctgagtgcgcgtgtgcgcgcacgcgaggactctagcctcgtgcccaggcagccagccagctacaaacgtgctcctctttaggatgccagcaggctgctggctccctccctccctacccctcctccccttccccttccctcctctcctcgccacgcgcctccctcccctcccccttgctggaagagcactccggagcggctgcccgatgctggagtccgtgcggcagcatcagcaaggtggctgagtggccgggctgctggtgggcgccggggagcctggagcgatggctgcacgctcccgccgcggggacagaggctgccatggagattctcctcattattcgcttctgctgtaactgcacctatggtaacccaggtgctcgctgtgggaggtggcggaccctcccacctctgggggccggctggagtgggcttagatgtggccggggaggttagagggccgcagggaaggagggtgggcgagcggctggacctgaattcccccttcgttttggcggcatccagcctagagttgaaacctgggggctgctcagagcagggccgcttgcaaatggaaggaccaggctggaggggtccaggtggccccgaggatcggtggggaattggtgggctagtgtgagagaacttcctggaggggctgttagggagagacggcgacgagctgtgcccgcagacgtagtagccctgaggccagggagagggtctgcgggggccaggcacagcgtggcgatgggtggcgatggtccggacggcggcgttgccagccgagagggtgccagcgcgagccagagggagaagttgggagtttctttgtttctggagagaggcgcggaggctgggcggcacggtattgtgtgctccgcgcacatgcagcagtaggcggaggacacggaggggctgtgggagcaggaaggagaggtttgtttccagccgtgagagacccccagccgaggtctgggccctcaactgtggaaggcaggtcggcagggccagcgggagaggggtgtggcaagctactctgtgaaggtcacacacacacacacacacacacacaccacctttcggtggaagggacccggaccatcctccttgcagctcccgcagctggctgggggctggggggaagtcccgggacaggtgcatgtcatcaacacgactgtcggtcgtaggaggatgaagccggcccaggtagggaggtgtccagaagcccgtggaccctgcctcaagaggcaagacgtgccaaggggtgccctgcctgcctgtggcagggagtggggtgggcacgtgtggctcccaggccggctgctctgggcctgagtctgtgggagcagcaggcggctggttttaggaccttcctcttccttcccaccaggtgtttcggctctgcacccttctcagtcactttgctttcctatctccctggtaacctggagctccttggagctccttgtcgaaggctgacttgagggggatggtggcttgccggaagagagatggcaggtttcctgggctccttcccaggggcggctgtgctggaggggctgtgtggggccagtgccccctgaccttctcaggaccctcttgatggaagcaagctctgaggcagcctctctcctgcggcccagcagggcggctgcaggaaccctgttctcacttgaaattggcctggtcagcgatcagaggagaaatggtctttttggtctggcctaggagttggtcaggtcttgactctgcctccctgaaaaggaaacgtacccttggcttcctctcccttccccaaaaggaagcttcgactcagtgaaacggacctgggacctggagttcacgttgcttcggtctccgtgatactgttgttgaagtcggcttcaaagtggggaatgaggagtgaaagggccagctcgtgaggagggggctcaccccatcctggtcactctttccaagaacgctcctgtggttcattgaggttttacaggtgctgcctttccctgaagaaggtgcagctcaaagcaaggagtgcgggtggatctacccagctcccaccacttgtagccacaagtctctggcctcagttgccttgtctgtaaaatggggctagtgagaattgcttcccgttttaatcacaggaaataatgagagcaaagcagttaactcagtacccttgggcacagagcgagtacccagcaaactagagagagaccagcttgctgcccaagtcagtgtcagtggagagggagagtgggtgaggccgggcaggaagcaggccagcctgcaggagcccagggacaggggaagggccagagcgagtgcctcaccctgagttctcaggggaccccagcgtgcaggggccgtggggagcacaaacttcagggccgctcttattcccccggttccctccgtatctgatgtggtcccagtgccgccaccccccccacccccaccccccccgtgcacctgccctcctggccgcccttccagggctcattccacagccttactcaggtggactctggaggtgaccacagacatgttaataacccctctgaaacccaacctgccatgtgttcagacctctgagcttagtcagaaacctcttcctcttgggacccaagagagggctgcggggagccgataatgcagtgtcagctttctgtggagccgccactccggagcccaccctggcaggtgtctgctgagcttgtgctttcttttgggtctctggggttctccagtgtgattttttccccctgaagatgggctgagccacaggtgggtgccttaaacagcctcagaaatggatcccacctgagctaggacctgggctgcaccctcagtgccgaggataccccaagactggcctcattccttcaagcttccatggcccatggggagggtctctggaaactgctagataagaaagggctacagatatgtcatatgaagtgtatttacgtaaaccagtggttggccgggtactcatgcctgtaatcccaacttttggcagactgaggcaggaggattgcttgaggccaggagttcgagaccagcttgtatttggcttgaggccaggagttcgagaccagcaacatagtgagaccttgtctctatatttatttttatttaaacgaagactcactgtgtcgcccaggctggagtgcaatggcgcaatctcagctcactgcaacctctgcctcctggattcaagagattcccctgcctcagcctcccaagtagttgggattataggcgcctgccaccacacctggctaatttttgtatttttagtagagatggggtttcaccatgttggccaggctgttcttgaactcctgacctcaaatgatccacccgcttcggcctcccaaagtgctgggattacaggcgtgagccaccctgcccggcccctcgtctctatatttttaaaaaaattaaaataaatacataaataaaacataaagcagtggttttcaaccattattatacattcaaatcagtaaagaagctttatagaaatgctgatggcccttgtggtcttgcagagatttgggttgagttgacggggctggggagcagcatctgtatcttttaaccgctcccccagtgattccgacaggcagccaagctcggactgcgggtaaggctggtggccctgctgaggctgcattttcttcacagccagcagattgctccctgaagtgtctgcttagccgcgcacggggtatttatatctcaggctttggagaactatcaggtttggggcccggctagggcgtgcgtgttcacgctgggacctgtcacaacctggtcttatgggacacccagtctgggatccttcttcccagatgaccaacctgcctctgtcactgcccctgcggcaggaggcccaaggtcatgaccccagggacagagcatccaggtgcaggactgaagctgagcctcctgttgggagggtgggcgcagccgcgtacaggaagggtgttgggaagtgttgatccaccagctgccacctccacctgtccctgctgaatcccagccatcctcacttggtgtccgggttgtggagggtgtggctcttgggggcctgggctggccttgcctgcgtcctcccagcctctttggggctctcatatgtgaggcctaacctgagttgcttcaggaaacctttgcccctcaggctgccacgtgtttgagagcacagccttttttctttttttttgagatggagttttgctcttgttacccaggctggagtgcagtggcatgatcttggctcgctacaacttccgcctcccgggttcaagtgatttccctgcctcagcctcccaaatagctgggattacaggcatgtgccaccacgcctggctaatttttgtatttttaatagagatggggtttcactggttggccaggctggcctcggggagcagagcctttctgtggagatcaggccagcctcctggcctccagcctccctgcctccagccttcctgtgctttgctatctggggtttgaggatgtggggaggggtctttcctctgagagatgaggccagtcctgtggatcacagtgaggcatgccaatcccagctggctgtgcctggccttcagctccaggagcctgagaatgataaggtctggagagctgcccttcctggaaacacagcatgtctccttcccccattctggggtcctgcatgtggcaggtgtgctagactctgcagggcatggctgggtggagctgtgtgattctggggttctgcgtgtggcaggtatgctggactctgcggggcgtggctgggtggagctgtgtgattctggggtcctgcatgtggcaggtgtgctagactctgcagggcatggctgggtggagctgtgtgattctggggttctgcgtgtggcaggtgtgctggactctacggggcgtggctgggtggagctgtgtgattctggggtcctgcgtgtggcaggtgtgctagactctgcggggcgtggctgggtggagctgtgtgattctggggtcctgcgtgtggcaggtgtgctggactcttcggggcgtggctgggtggagctgtgtgattctggggtcctgcgtgtggcaggtgtgctggactcttcggggcgtggctgggtggagctgtgtgattcagggctgggggtccaggagagcatctgccttgagccaggtgaggccaggacaggcctggggaggggggcggggcggctctcgatgaagccatgtctgatgggagaggaggcagggctgcggagggagcaggggctgccagggctgtgtgtcacctgtgtctgctgtttggtcggcccggggagtgagaacagaggtgggggctgccgtgggctcactctggtgtccctcgaggggtgttcacgtgggaagcatgcgggtggggggacgaagctggtctctggggtgttgggttgccctcgtccatcatcctcttcctccttctccctgtctcccccgacagctctgctctacaagcccattgaccgggtcactcggagcaccctagtcctacacgtgagtgtcaagcctccgaatggccagagagggcttaggagttcagtggaagactgagcctgggtgagagggtgctggagtcaccgagaacagtccacctggggaatcaggggttcctaggctccaaggatgcctgtctggcccgcggtatccatgccgccaggctagggcctgaatacagcttggctactaagcttgacgtggccaggtgctcccggggaggcaggcattcctgcttccccacccgctgcctcctggtctccagtgtccttggagcagctgcagggcagacacagggtttctctcccagctgctcggggggatgagcctccacctggtctccacactggggagagagtatgactgtggccaggagaagagggggcagccagggccctctcccctgctgtgctggctctgattttttttttttttttttttttttgaggcggagtctcactctgtcacccaggctggagtgcagtggtgcgatctcggctcactgcaacctctgcctcctgggttcaagcaattctcctgcctcagcctcccgagtagctgggactacaggcgcccgccaccacgcccagctaatttttatatttttactagagatggggtttcaccacgttgcccaggctggtctcgaacttctgacctcaagagatcccccgcctcggcctcccaaagtgctgggatttcaggcatgagccgccgtgcccggcctgactctgatttgtagttcagattttgcgggaattaggcaggtccctgagtgcccaccctttggatggggactgagcactccccggtggccacacatcaggccccagagccgctcccctcaactcaccgcctcacccttcccaggacctgctgaagcacacacctgtggaccaccccgactacccgctgctgcaggatgccctccgcatctcccagaacttcctgtccagcatcaacgaggacatcgacccccgccggactgcagtgacaacgcccaagggggaggtgagctcagagcccggcacggcccctcacccaggctgagaagtatcaggtccctcgtccccttctctcacacacgggcggcaggtccctcgtccccttctctcacacacgggcggcaggtccctcgtccccttctctcacacacgggcggcaggtccctcgtccccttctctcacacacgggcggcaggtccctcgtccccttctctcacacacgggcggcaggtccctcgtccccttctctcacacacgggcggcaccgggtgcctcctgcctctccaatcctgatcccccattcccagccaaggagaggttttcagcccttggtcaccctgatgacctgcagctttccaggccctaggctgagaagtttaagtccagtgtctcattaatcctcataataatctagggaggccgggcacggtggctcacacctgtaatcccagcactttgggaggctgaggcaggtggatcacttgagttagaagtttgagaccagcctggccaacatggtgaagccccgtctttactaaaaatacaaaaattagctgggcgtggtggcggatgcctgtagtgccagctactcaggaggctgaggcaggagaattgcttgaacccaggaggcggaggttacagtgagccgagatcgcaccactgcactccagcctgggtgacagagtgagactccatctcagaaataataataacaatccagtgagccagaagaacctgaggctggggagtctctccaggtccaccacgcagtctttcagccactggtgtcagagctggattcctcacctgggactgtctggaggcccacgccggggaagtggcctccgggtgcctcattcttgaatgcagacacctgcctctggccagtgtgatgccgtcagggtctcctaggaagcgaagggagcaggagcttggagctgcttcagctcggcctgcacacgcagtggcttgcggggagcccacagcaggaaaggctggcgttggaggtggtggaggccgtccaggttgccggaatgtccagtgggcacctgcatgtgggacagccgttccctgggggcccttcttgatgcaagggtggggacagcccagcaaggggagtaccaggaagcatgagagggacagttgccttcgtggattggcagccgggcccgggtgaaaggcttcctgtccaggggaggccattaggcggccgttacgagtgaggctgacagggtgtctgctcctgtggtctgtttacgagcccccagggtctcctggggagaaagtggtgagggacaggcctggacagtgtccactgggcagagagagccgattccgtgcggctcctggtgctgatgtgcagcgtctggggatcccgtcgtctgttttactctggggatatctgaaaaatctccagagggcttagcgtaccctccgttttcagtcatcctttttttgagactgaatctcattccatcgtccaggctggagtgcaatggcgtgacctcagctccactgcagcctccaccctctgggttcaagcaattctcctgcctcatcctcccaagtagctgagattacaggcaggcgtcaccatgtctggctagtttttgtatttttagtagagacggggtttcgccacgttggccaggctggtctcaaactcctgacctcaggtgatccacccgcctcagcctcccaaattgctgggatgacaggtgtgaaccactgcgcccggcctcggtcatcttaattgtatactttgaatacgctcacctacgtattacagcagatgtaggtcacaccgtgtatcatacaggaaaggctggcacagatggggacgaccccccggctctgagcgggggttggaaactctggaactcccacgtggagcagaaaccacccagagcccaggttagagttggctgcaggtcccctctgggcactgctgcagtcccaggctggagggcccaggtctcatccccagggggctggagaagccagggaggagtagcacagacaggcctgagtgggtctcgggtctcgggtctcggttgagccggggctagatgaagttcgccgccgcggtcgggagggattgcaaacggggatgttcgtgccccagggtggagaaaccaggtcgtccagggcagggggctccagggttagccgcggagagccccgtgcgttgcacacacttaatgtgccaggcactgtgctgtttcacatgcaccatctcgatgagtcaccttatgaggcagacctcactgtccgcacttaacagaaggtgaatctgggattcagagaggtcagggagcctgtctgagatcacagctgagaagcctgttggcattcaaacccatgcccatgtgactccaaaggcagtgcttgaaccacctttggttaagggatgacaggctatgccgcctctcggtccagtcctccctggctggccatgcccccgtgtgcaggctctgccctcggccgcattcccctctgagcaggctggggggtctgccatctccctcagacgcgacagctggtgaaggacggcttcctggtggaagtgtcagagagctcccggaagctgcggcacgtcttcctctttacagatgtcctactgtgtgccaagctgaagaagacctctgcagggtgagtgtgtgagtccaggggcacggggcgggggagggggtccggacctctgcggggtgagtgtgcgagtccggggcgggggagggggtcctgacctctgcggggtgagtgtgcgagtccaggggcgggggagggggtccggacctctgcgaggtgagtgtgtgagtccaggggcgggggagggggtcctgacctctgcggggtgagtgtgtgagtccagtggcacagggcgggggagggaggccggaccctgccacccatggagccttcagcaactttgttggttttttttcttttgagacagggtcttgctctgttgcccaggctggagtgcagtggtgcgatctcggctcactgcaacctctgcctcccgggttcaagcgattttcctgcctcagcctcctgagtagctgggattacaggtgcacgccaccatgccaccatgtctggctaatttttgtatttttagtagagacggggttttgccatgttggccaggctgatctcaaactcccaacctcaggtgatctgcccgcctcggcctcccaaagtgctgggattacaggcatgagccaccgcgcctggccggttttttccttttaaaaactatattaattaacttaatttcactacatagccttttttcctgaaagtaagtcatgtttttaattataaagataatataaggccattggaggaaaccccgtcccccactgaagcatgaggtccgactcctgccgcgctgcttccttccctgtttttaaatgttctcatgtttcttcacacagtcgtaatcactgtgaatgcccaatttggggctctgctgtttctgtttcgtgtcataagcattttccctgttgctgcctcatcttcataatcatccttttactttcctgcacgatgttacccgtagatgtgccatcgtctacttaagcattctccttttattagacatctctgaatttctgctaactgcagtgctgtgaatattcaccacgtctcctgctactatttattgagggtttatgccatgccaggtgccgtgacacatgctttgaatacatgatttctagtcctcccaacacctccacaaagtagcgactgttgttccctaatcatagatgagagaggagtcttggagaaggtaaataagcagcccaagctcgcacagctagaggcacaggtgggactggaaccccaagctgacgtgcaaactcctttgagcctccttctctctacccgggagggtgggactggaaccccaagctgatgtgcaagctcctttgagcctccttctctctacccgggagtgtgggtctgctctgtgccttgagcagaggctcattctgcgttcattcacacattcttccacccacacttagtgatcaactgcagtgtgccaagcacaccccttctcacggctgagaagcggcagtctggattcaaacccgtgtctgtgggactcgtttaccatcaggctatcttgcctctcccttcagccctccctggttggctgtgcccccaagtacagcacaggggactccacagccagtgtgttacaccaccaggctatcctacctctcccttcagccctccctggctggctgtgcccccaagtatagctcagggggagcaagccccacgcccacctcaacactcaagggtcagaatgagaagtgcaaatctaagtcctaggggaaggatcgatgattatgaacgtcaataaagggatgactgggcgggcacggtggcttatgcctgtaatcccagcactttgggaggccaaggcgggtggatcacctgaggtcaggagtttgagaccagcctggccaacatggcaaaactccgtctctactgaaagtacaaaaattagctgggtgtgatggcaggcacctataatcccagctacttgggagaatgaggtgggagaatcgcttgaaccctggaggcagaggttggagtgagtggagatcgcgccattgcactccagcctgggaacaagagcaaaactccatctcacaaaataaaaataatttaaaaaataataataataaaggacatgactccctggaactagatcatgtttgagatagttctgaggcagagatggcaataataagcacacatgcttctgcctgtcgtcctttgcgatggcagacattactaatcacatatgcctctgcctgctgtcctttgccatggcagacatcactaatcaactagggcacactttcttgctagacttggatgtggctttgtaatcctccacccagtgttgacccatgtgaccactcttgataagaggtggcatttggaataacacctgtattccattgctagcctgaaggatattgaacacggatagtctagaagggagggaggggattgtggtggggaataggaaaatgtgagcccagccaggaaggcttcgctcttcttgatacctaagtggtttgggatgtttgacaacatgagtcatctgggccagaagcctggtaaggtgaaggggcggagttgctccctgcgggcggggcggaccccagaacccagctttcatcactccagtgtgtgtttcccaatcaggctcctcaggagcagggatcgttcgtgcttctggcgagttctcagtcaacccgtcagtggttttgtggttctggacccaagagttgaggctggaagagccaggctccctctggctcatggctccctctggctcgtttgcaggaagcaccagcagtatgactgtaagtggtacatccccctggccgacctggtgtttccatcccccgaggaatctgaggccagcccccaggtgcaccccttcccagaccatgagctggaggacatgaagatgaagatctctgccctcaagagtgaaatccagaaggaggtgagcagagcttggtatctgagcctggggccctttgagccagctgtgttgggggaggtggaggtgggaagttgtaaggtttgagactttgagagggagccttgagtgtgtagttactaagggaaagaccccgactacagtagctccaagcagatcgagggggtcagtgctcaggatttcatagggctaacatgggaagtgccctggaaagcagtgcatgttgaacacgatagaaaggggaagcaagtagccaggcgcagtggctcacacctgtaatcccagcactttggaaggccgaggcaggtggatcacctgaggccaggagttcgagaccagcctggccaacatggcaaaaccctgtctctactaaaagtacaaaaattagcagagtgtggtggtgggcacctgtaatcccagctactcgggaggctgaggcaggagaatggcttgaacccgggaggtggaggttgcagtgagccaagaacatgccaatgcactccagtctaggcaatagagtgagattctgtcaaaaacaaaaaaaaaaagtggaggtagagggaagcaagagaagaaaaagcaggcttttgtaaggaaaagcaggacctgtgcaaggaaaaagacctgggaggcctctcagaaactgacagatcaagtaggcaaataaataaggagagagaggccctgaatgccacaattaacatgcttgacttaaaaatgcagagaagcttgtgccctgacagaaaactgagattcttgtcacacacgtttgggaccttcacatttatcctataataggccactaaggaaatctcaaaatttttctgcaagttgatagcatacaagtcatgttcacagaccacagtggagtaaaattagaagtgaacaagaatattggtcagcctgggtgcagtggctcacacctttaatcccagaactttgggaggctgaggatggtggatcgcctgaggtcaggaattcaagatcagcctggccaacatggtaaaaatccatctctactaaaaatacaaaattatccaggcgtggtggatcatgcctgtaatcccagcactttaggaggcccaggcaggcaggtcacctgaggtcaggagtttgagaccagcctggccaacatggtgaaaccccatttctactgaaaatacaaaattagcctggcgtggtggcttccgcctgtaatcccagctactcaggaggctgagacaggagaattgcttgaacctgggaggcagaggttgcattgagctgagattccgctgctgcactccagcctgagcaacagagtgagactgtctcaaaaaaaaaaaaaaaaagcattggtttggaaagttcaaactgacaaggtaaagaggaaatcaaaattcaaaatgagaactgcaaactgtttagtgctgtctggaaatgagtgtactacataccagtacccatggatgcagccaaagtgctgtttagaggaacatgaatagccctcagttcacataacaacagtgtctagaggaacatgcatagccctcagttcacataacaacagtgtctagaggaacatgcatagccctcagttcacataacaacagtgtcttgtaacatgcatagccctcagttcacataacaacagcgtctagaggaacatgcatagccctcagttcacgaaacagcagcgtctagaggaacatgcatagccctcagttcacgtaacagcagcgtctagaggaacatgcatagccctcagttcacgtaacaacagtgtctagaggaacatgcatagccctcagttcacgtaacagcagtgtctagaggaacatgcatagccctaagttcacataacagcagtgtctagaggaacatgcatagccctcagttcacataacaacagtgtctagaggaacatgcatagccctcagttcacataacaacagcgtctagaggaacatgcatagccctcagttcacataacaacagcgtctagaggaacatgcatagccctcagttcacgtaacagcagcgtctagaggaacatgcatagccctcagttcacgtaacagcagcgtctagaggaacatgcatagccctcagttcacgtaacaacagtgtctagaggaacatgcatagccctcagttcacataacagtgtcgagaggagcatgcttagtcctcctctcacataataacagcgtcgacaggagcatgcttagccctcagttcacgtaacaacagtgtctagaggaacatgcatagccctcagttcacataatagcagtgtctagaggaacatgtatagcccgcagttcacgtaacaacagtgtctagaggaacatgcatagccctcagttcacataacaacagtgtctagaggaacatgcataaccctcagttcacataacagtgtctagaggaacatgcatagccctcagttcacataacaacagtgtctagaggaacatgcatagccctcagttcacataacaacagtgtctggaggaacatgcatagccctcagttcacgtaacagcagtgctagaggaacatgcatagccctcagttcacgtaacaacagtgtctagaggaacatgcatagccctcagttcacataacaacagcgtctagaggaacatgcatagccctcagttcacataacaacagcgtctagaggaacatgcatagccctcagttcacgtaacaacagtgtctagaggaacgtgcatagccctcagttcacgtaacagcagcgtctagaggaacatgcctagccctcagttcgagtaacaacagtgtctagaggaacatgcatagccctcagttcacgtaatagcagtgtctagaggaacatgtatagccctcagttcacataacaacagtgtctagaggaacatgcatagccctcacttcacataacaacagtgtctagaggaacatgcataaccctcagttcacataacaacagtgtctagaggaacatgcatagccctcagttcacataacaacagtgtctagaggaacatgcatagccctcagttcacataacaacagtgtctagaggaacatgcatagccctcagttcacgtaacagcagtgctaaaggaacatgtacagccctcagtttcacgtaacaaacagtgtctagaggaacatgcatagccctcagttcacataacaacagtgtctagaggaacatacatagcccttcagttcaacataacagcagtgtgtagaggaacatgcatagccctcagttcacattaacaacagtgtctagagggaaccatgcatagccctcagttccacgtaacagcagtgctagaggaacatgcatatcccctcagttcacataacaacagtgtctagaggaacatgcatagccctcagttcacataacagcgtctagaggaacatgcatagccctcagttcacataacagcagtgtctagaggaacatgcatagccctcagttcacataacaacagcgtgtggaggaacatgcatagccctcagttcacgtaacagcagtgctagaggaacatgcatagccctcagttcacataacaacagtgtctagaggaacatgcatagccctcagttcacataacagtgtctagaggaacatgcatagccctcagttcacataacagcagtgtctagaggaacatgcatagccctcagttcacataacaacagcgtctggaggaacatgcatagccctcagttcacataacaacagtgtctagaggaacatgcatagccctcagttcacgtaacaacagtgtctagaggaacatgcatagccctcagttcacataacagcagtgtctagaggaacatgtatagccctcagttcacgtaacaacagtgtctagaggaacatgcatagccctcagttcacgtaacagcagcgtctagaggaacatgcatagccctcagttcacgtaacagcagcgtctagaggaacatgcatagccctcagttcacgtaacaacagtgtctagaggaacatgcatagccctcagttcacataacagcagtgtctagaggaacatgcatagccctcagttcacataacaacagtgtctagaggaacatgcatagccctcagttcacataacaacagtgtctagaggaacatgcatagccctcagttcacgtaacaacagtgtctagaggaacatgcatagccctcagttcacataacaacagtgtctagaggaacatgcatagccctcagttcacataacaacagtgtctagaggaacatgcatagccctcagttcacgtaacagcagtgtctagaggaacatgtacagccctcagttcacgtaacaacagtgtctagaggaacatgcatagccctcagttcacataacaacagtgtctagaggaacatacatagccctcagttcacataacagcagtgtctagaggaacatgcatagccctcagttcacataacaacagtgtctagaggaacatgcatagccctcagttcacgtaacaacagtgtctggaggaacatgcatagccctcagttcacgtaacagcagtgctagaggaacatgcatagccctcagttcacgtaacaacagtgtctagaggaacatgcatagccctcagttcacataacagcagtgtctagaggaacatgcatagccctcagttcacataacaacagtgtctggaggaacatgcatagccctcagttcacataacaacagtgtctagaggaacatgcatagccctcagttcacataacagcagtgtctagaggaacatgcatagccctcagttcacgtaacaacagtgtctagagcaacatgcatagccctcagttcacataacagcagtgtctagaggaacatgcatagccctcagttcacataacaacagtgtctggaggaacatgcatagccctcagttcacataacaacagtgtctagaggaacatgcatagccctcagttcacataacaacagtgtctagaggaacatgcatagccctcagttcacataacagcagcatctagaggaacatgcatagccctcagttcacgtaacaacagcatctagaggaacatgcatagccctcagttcacataacagtgtctagaggaacatgcatagccctcagttcacataacaacagtgtctagaggaacatgcatagccctcagttcacataacaacagcgtctagaggaacatgcatagccctcagttcacgtaacaacagtgtctagaggaacatgcatagccctcagttcacataacagcagtgctagaggaacatgcatagccctcagttcacataacaacagtgtctagaggaacatgcatagccctcagttcacataacagcagtgtctagaggaacatgcatagccctcagttcacataacaacagtgtctagaggaacatgcatagccctcagttcacataacaacagtgtctagaggaacatgcatagccctcagttcacataacagcagcatctagaggaacatgcatagccctcagttcacgtaacaacagcatctagaggaacatgcatagccctcagttcacataacagtgtctagaggaacatgcatagccctcagttcacataacaacagtgtctagaggaacatgcatagccctcagttcacataacaacagcgtctagaggaacatgcatagccctcagttcacgtaacaacagtgtctagaggaacatgcatagccctcagttcacataatagcagtgtctagaggaacatgtatagccctcagttcacataacaacagtgtctagaggaacatgcatagccctcacttcacataacaacagtgtctagaggaacatgcataaccctcagttcacataacagtgtctagaggaacatgcatagccctcagttcacataacaacagtgtctagaggaacatgcatagccctcagttcacataacaacagtgtctggaggaacatgcatagccctcagttcacgtaacagcagtgctagaggaacatgcatagccctcagttcacgtaacaacagtgtctagaggaacatgcatagccctcagttcacataacagcagtgtctagaggaacatgcatagccctcagttcacataacaacagtgtctggaggaacatgcatagccctcagttcacataacaacagtgtctagaggaacatgcatagccctcagttcacataacagcagcgtctagaggaacatgcatagccctcagttcacgtaacaacagtgtctagagcaacatgcatagccctcagttcacataacaacagtgtctagaggaacatgcatagccctcagttcacataacaacagtgtctagaggaacatgcatagccctcagttcacataacaacagcgtctagaggaacatgcatagccctcagttcacgtaacagcagtgtctagaggaacacgcatagccctcagttcacataacagcagtgtctagaggaacatgtatagccctcagttcacgtaacaacagtgtctagaggaacatgcatagccctcagttcacgtaacaagtgtctagaggaaggcaccacgggaggagcatccctgtgagtggaggaagggcctggagcggtttggtcagcttggtctgttttcctcacctctcaggttcagcttaggcctcacctcccctgggaagcttctctgacacccacgcccaccacagtcttggttgggtgccctgtccccagatcctgtggctttttgttcacctgtggctttgcttaaatggtactgaattgtaattgcattgtcagactcctctcttccccactggaatttgaactccagggacagcgctattttcttctgttccatgttcctcatattcgacacgtagaaaacaggtggttagggcccagcgtggtggtttacaccggtaatcccagtactttgggaggctgagacgggtgggtcacttgaggccaggagttcaagaccagcctggccaacatcatgaagccccgtctctatgaaaaatacaaaagttagccgggtgtggtggtgggtgcctgtaatcccagccacgtgggaggctgaggcaaaagaattgtgtgaacccgggaggtggaggttgcagtgagccgagatcacgccactgcactccagcctgggcaacagagtgagtgggactccatctaaaaaaaaaaaggcacttagtaaacaaacaattattgaagaaaacataaccagatggcctctctgaggattctttcaactcaagcatctccctttgaacaggggaaagcaagatcaccattacagccccaggagtgttcagggctgggggatgtcctaggacagagggtccaactggtgatacatctgcccagagggcttcctcgccagcacagctgtccccctcctgaacggctgggccctgcccacagtgcccgcccaggagcatcctgcgtgcctgtttcccacccgcccctgggaggcttgctgcctccccgttgccccagctgtgcagacgtggccttgtgcccagtcgagtcaacagtcaacactcagtgagccccactggctgtgctgcctggggtgtgccgggtgcctcatgtatatccctgtccagtggaggaagcagacacgccccttgctgaccacagagtgtggtacatgtgagtcactggagaggcacaggtgccgtcctctgagtcacagaagaagcagtgatttgttttttgttttttgtttttttttgagatggagtctcactttgtcactgtcgcccaggctggagtgcagtggcacaatctcggctcactgcaacctccacctcccgggttcaagcaattcttctacctcagcctcctgagtagctgggaataaaggcgtccgccaccacgcctggctaattttttgtatttttagtagagacggggtttcaccgtgttagccaggctggtctcaaactcctgacctcatgatccacccgccccggcctcccaaagtgctgggatgacaggtgtgagccaccgtgctcagccttgttctcttgataataattttttaaattttcatgttttttctaatccccaatataatactggctggttttaatgagaaatgctcgtagtaccagcatgtacagggtaaagctggtcgccactcacctcccgctgctgacagtttgaggtgtattcttctgaactcttctttgcttatgctggtgtgcgcccgcgtgtccaatgagactagactacacgtgctgttttgcaacttcagcattttactccacagtgggtctttgagccctttggatgtatcagattctttttctttctttttgaggtagagtctcgctctgtcacccaggctggagtgcactggtgagatttgggctcactggaacttccacctcccgggttcaagcgattctcgtgcctcagcctcccgagtagctgggattacaggtgcccgccaccacgcccggtagtttttgcatttttagtagagacggggtttcaccacgttggccagggtggtctcgaactcctgacctcaaacgatccgcccacctcggcctcccaaagtgctgggattacaggcgtgagccaccgcgcctggcagtatcagattctttttaacaactgcctcctgctctgtcgcttggctgcatacaaatgtttttgggtgtttggattgtctctgattcttcgctcttagcaggcaagtcaacagtaaacatcactgcgcaggtgcctctgcagtaggttccctccaagtgggatgggcagggcagggtgagtgtgcgcttaattgacaggcttttacctctgaaaaagctgtgactggtggcattccccctgcggtgtgtgagggtgactgtcccccacagtgtcacaacactggctgtgaacattctttacaattttgccagtccagtgggttaaaaagaacaaaacaccatagaggtgaattctaactgaggagcttgaggatggccttgggagctgagacttgaagcataatggtggttaataaaagggagggggtcctttacgaaacagacagaaacttggaacattgagggagcaggctctgcccgcagaggatgaatgtctggtgagagggggaggctgagccgacgggacctggtgggttgtctgccgggcagggaggctggaaccctgccatgggggccttggtgccaggctagcaggtggggcttcaggctgaaaggtgtctgaggtttctttaagcaggtgtctctgttgtacccaggatttaatgtgtagaggcagcagagtgacagtacagagaggttaatactactgtaatatttgtattatttagggttctcaagagaaggaggcatagcaccccgcccagggccacgtggagaggtgccagctttgaacaggaggcaggaatggaaagaaagtgtggccacagcttttctgtggagaaacagggcagggaaagggcttggcaccagctggcttccgttatgtcggcagccctgggctagaggagtggtctctggtgacctggtccctggccctgggtgacgtggggcagaggagatgctggcttggcgagtgagcgtcgggtagagaaggtggttggggacatgggctctggatcagtgggtgtgtgtatgaaagctgtgctcatagggcatcactgacaggcttaggaattagtgagccctgtgggggagcagtttctcacccagctacccgcctctcctgccacaagatgtcaaaacatcacgaaatacggaaaatgtaaagagcatgttaacacacagtggagtgtcgtgcttagtgctgctcgtgagaaaggcccgagtgtgaggggaaccctctgtgtccccatctcctgcagaaagccaacaaaggccagagccgggccatcgagcgcctgaagaagaagatgtttgagaatgagttcctgctgctgctcaactcccccacaatcccgttcaggatccacaatcggaatggaaaggtcaggatgggtgggggtgggaccaagacagccccttccttagtccagagcagcccactctgtggctcctggccctgacctgtatgaaccggaaactcaggccccctcttcctgaggaggctgccatggctccagctgttgactcgctctcccctctcgtgtggaatgagtgccctctgctggccgtccctggcacagccgctcctgtcaccttggcttcccaggaaggagctcccccttcacccacccacccccagctgcctcctcctgcaaggtcagctgtgcctggataaggaggagctttgggccgggcacagtggctcatgcctgtcatcccagcactttgggaggctgaggcaggcgaatcacctgaggtcaagagtttgagaccagcctggccaacatggcaaaactctgtctctactaaaaacacaaaaattagccgggcgtggtggtgggcacctgtaatcccagctactcaggaggctgaggcaggagattggcgtgaacccgggaggtggaggttgcagtgagccgagattttgccattgcactccagcctgggcaacaagagcgagactctgtctcaaaaaaaaaaaaaaaaaaaaaagataaaaggagctttgttggggtccccaggatctgggagtacgctttgcctgactgtggtcacccactttattcttatctcctctcttcagagttacctgttcctactgtcctcggactacgagaggtcagagtggagagaagcaattcagaaactacagaagaagggtaaattcctgcctcttccacgctccccaatgatgtccgtggcattgatgggccttttgtttttctaagcgtttcatgtccagtatcacgtctttggccctcgcagtcaccctcagaggtgccagggtgagcgtttaaggatgttacggattaattgagacccaaagaatctaactgattggctgaaagacatgatgatttagtcctgggactggacccagagcccagcctgggctttctctctctctctacctctctctctctctcacacacacacacacagagacacacacacacacatacacagaggctgggtacggtggcttacgcctgtaatcccagtcaggagtttgagatcagcctgggcaacgtggtgaaaccccgtctctactaaaaacacaaaaattagccaggtgtggtggtgggcacctgtaatcccagctactcaggaggctgaagcaggagaatcccttgaacctgagaggcggaggttgcagtgagctgagatcacagcactgcactccagcctgggcgacagagtgagactccgtttaaaaaaaaaacgaaaacaaaacgcatacaccacacacacacacacacacacacacacacacacacacacacacctcttcagttagattctcctactctgacccctctcacagcatctacaccagtcctgctgtgtccacaaatccttccccctccctcgcaaggaccaagtctgccccagggattaagccgtcttcctgcagcagcccccagggaagagcagccggtcctggtggaccagtgcccacgctcccttctctctcggctctccctccagatctccaggcctttgtcctgagctcagtggagctccaggtgctcacaggatcctgtttcaagcttaggactgtacacaacattcctgtcaccagcaataaagacggtaagctcgggaaccacaggtggcccaaccggcaggtcccagccctcagagcgtggccggcttcccgtaaggactcagacagacatgtggctgtaaatggctgatccctgctcggctgtgctgagactgttgagtggccaggacacagcttgggtaggggtgactgtctactgagttcccagatgaccccagcttttccttgggcccctctgtctggcttgggagaactggcaccctggtgcactgagattgtgctgttaatatattcatgagagagcagacccggtagataaaatggtgtatgggaaatgaggctggaagtttccagggaccagctcttgaaaggccttgaatcccaagcaagggagtttggaattcatgctgtaagcccgggagtctgggggggttttgagcagtggggagctgtgatcagggctgggaactgaccggagtgggtgtattctagctgcctgtgtgctgggaaagggtccactttgtgaacggggtcctgaaggcaagctttcctcgacataaatcattagcagaatgatttatcatattggtcagttttcagtgccaggataggcaggatttggagggagagacagtacccatggggaatggtactaagtccctgggccaggatggtgggtgtgctggacccccccaggctgagtggaggagagaaggaccccctagccctaccccgggcagctcacatacaaggccgccgtggccttcggaaactttttcatctggccaccaggtggtgatgttggaccaagactcagctgagtctcataccccgtctgcctcccgccggcctggggtggaggctgaggggatccgctgaccaccctctgccctgggggcttttctctcttgcagacgatgagtctccaggactctatggcttccttcatgtcatcgtccactctgccaagggatttaagcaatcagccagtaagtgccctggccaggacgaggttgggtgggccattgtggattctgcactgctctgcccaggatggggccctgccagcacgcctttagacatggggcattcccctggaggccagaaaccagctcctcttggcagggaggtcacccctggcctttgtctccaaagtcctctttctcaagccctccctgaagctgtctgaaacctaggggccgggcgcggtggctcacgcctgtaatcccagcactttgggaggcccaggcgggcggatcacgaggtcaggagttcgagaccatccgggccaacatggtgaaaccccgtctctactaaaaatactaaaattagcgtgggcatggcggtggacgcctgtagtcccagctacttgggaggctgaggccagagaatcccttgaacccgggaggcggaggttgctgtgagctgagatcatggcattgcactccaccctgggcgacagagcgagaatccgtctcaaaaaaaaaaaaaagaaaccgagtgcgacaaacacatggactccaacttcatatctgagggcgacaaacacgtggactccaacttcatatctgcccatgacaagctgtgtgaccttgggcaagtttcttaacctctctgggcctccactaaaaggcagtcacgcttgtgaattttgacccgagagcaggctgggatatgatcgtgtgtgtgcaacgctggtgtgctgccacgctcatcgctttttctccccttcccccttgtgggttcctcatactaaatctgtttttagtgtctcacaaagtaggattgcactttttaatttttaaaaaatttttttttagagacaggttctccccatgttggccaggctggtcttgaactcctgggctcaagccatcctcccacctcagcctcccaaagtgctgagattacaggcgtgagctgctgcgcccggcctggttgcgctttttatctacctgttatccacacgggaatctgtgagtcagttagacagctaatagtttctacccatttgccagaggaggtaaccgagtcacagagaggagaaaagacttaacatcacagaggatcagaaaccctgactctctccctctccacctgcccctcccactccctgctcttcactggcaggtggggtctgccctcacccctccctgcagcgccccacacagaggtgactccccgggccgttagagcagcctttcccaggaagcctccctgagttcctgggggcaaactggcctcccttctttgtcccttctttgtgcccacatcccctgaggttccttgtgcccccatcccctcaggttccttgtgaccccatcccctcaggttccttgtgcccccatcccctcaggttccttgtgcccccatcccctcaggttctttgtgcccccgtcccctgaggttccttgtatccccatccctttgaggttccttgtgcccccatcccctgaggttccttgtgcccccatcctgctcagggcaagctggttatggcacctgtcatgctgttttgtcacttaacaatttgcgtctcccactgtgagttctctgagggcgggaaccaggtctcctttaccctgggatgcatgggagctcagaaatgtggaatgaagtcgttaatttacacagcacctaccgtgcacctggagaaggtgagaacatggctggcgtgtggacgtactcacatgtgcaaagcctgtggcgtgttcagagcctctcagtctcacggtccgctctgagcctccggcatcccgccgaggtcacggaaaccatccctgttttacacacgaggacgccgaggctcggaggggctcaaggttccttcctggagtcacacagtagcaggtggtgcagcagaatccacgtcttccggcaccagagccggagctctaaccttttgggcacttctcgatgtctggccgggaacaccacacggtccctcaggctgcttgttaccgtggaagcttcctgaaccctctccagacccgtagacctcccttcttgggggctgccgctgaggagcttctggctagtgagctctgaagcactgtcccacccatgtctggaccaggcgccaccactccatgtccccagatgccgcccctccctctcctgcttcccgttggccgggaggtcctcgcctcagggagccgacccgtggcctcccagcctgggcgggtgtcagagccggctgagctgctccaaaatctctctttacccccagattatcctcactcccttcgccaccgccacccctgacccactcatatgtctgttctcactcagaggtgaggccctgtgtcttcagccgtggtaaactcaggacctctggacaggcaggcccagggtgtaggcaccatgacttttcctgctgtgcagacaggaacctggggagagaagggaggtgatctgtgcagagctggggtgtggacccagatggtctgactccggaaccctcgctctgaccctgtgagccgtccccagctccttccggaaccctcgctctgaccctgtgagccctcccccagccccttctcgaaccctccctctgaccctgtgaaccctcccccagacccttccggaaccctccctctgaccctgtgagccctcccccagacccttccggaaccctccctctgaccctgtgagccctcccccagccccttccggaaccctccctctgaccctgtgaaccctcccccagccccttccggaaccctccctctgaccctgtgaaccctcccccagacccttccggaaccctccctctgaccctgtgagccctcccccagacccttccggaaccctccctctgaccctgtgagccctcccccagccccttccggaaccctccctctgaccctgtgaaccctcccccagccccttccggaaccctccctctgaccctgtgaaccctcccccagccccttccggaaccctccctctgaccctgtgagccctcccccagccccttccggaaccctccctctgaccctgtgagccctccccagcccctcgaggaggggctcacaccgagatcaatccatgatgacagcacttcatggcccgtctcagacacacaggcccactccctggtctggcccaggctggggtgcccagggcctctgtgttgttcacctgcaaatccccagccccgttctgtgtgttctgaggcccacctgggtcttctttctgttgctccagctggaggcttcttggggtagctgcactgtcctttctgcaggaaagctggtttttttgttttttttttttttgagaaagagtcacttggtcgcccaggctggagtgcagtggtgccatctcagctcactgcaacttccacaccccaggttcaagcgattgtcctgcctcagcctcccgagtagctgggactacaggcatgtgccaccacgccgggctcacttttgtatttttagtagagatggggtttcaccatgttggtcaggctggtctcaaactcctgacctcaggtgatctgcccaccttggcctcccaaagtgctgggatttacaggcgtgagccaccttgcccggccaggaaagctgttctgatggagaatggcccagctgggcagctgcaggggctaagtggagtaagccacctgcactgtatgcccgcactgtgacctctgacgttgtttcacgctgcagagggttggccatagtgtcccaaaggcacctcccacaccacctctggtaccctgggaacaacctcggcatctccctggaggtgggaggactgctggggtccgagcccagggcgggtgtgggtttgcagagggcctggggtccgtgccggtgctgtggcctcagcagttgggtcccaaggtagattttcagcctgaaggccagggtggaagatggaaatgccggggaaagcccccggccctgccctcccgccccagccctccactgccttgttacctggagcgcttggtggtggtgggagcctcgttcaccgtgtgccagctgggttcccagccctgttcttggtactgcgggtacaccggcaggcaggaaaacccaggcttctctccacatggtgtttacgtcgtggggggagagagactagggacgcacgagtagagaagatccctttggtttatgttaagtgcagcggaggaaaccacagcaccctgggcttggggatgtgggcgttgttggtcgtcaccgcggcaggggatgctccgagcattcaggacccagaggcagggctgctaaacgcctcccaccccaaatgccgctgttgaggcctgggcacccatgttacggggagaggtggctccagggcggtcagtgaagagtttgtggtgtcgtctccatggtgaggaagatgtggagacggaacagtcaagggccctttagagggaggaggaggccagagtgtggggagggccgaggtgggaagggcagagtgtggggagggccgaggtgggaagggcagagtgtggggagggctgaggtaggaagggcagagtgtggggtgagccgaggtggggagggctgagcccctaagaagggggcaggggagaagccagatggtcccgggcttcagggaggagagagccaagatgccatccgtggggacgttggaaaggacagatgcgatgtccccctccatcctgagtgccgccccagctgccccaccctggccccactcactcagtatctccgtctgtccttcccccacagacctgtactgtaccctggaggtggattccttcggctattttgtcagcaaagccaaaaccagggtgttccgggacacagcggagcccaagtgggatgaggtgagtggcaggggctggcatctctgtggggaccccaccaccccgtgctcgtggcttgtctgctggggacggccagcccattggttggaccagctatgtctgcacccccctttctgctccctgctcctctggcttctgatcgcggtgtgtgtctgggtgtcagaccctgtggtgtcagctcaggcccccagactccaggggtgatgggaggcctctgggagctccagaaaatctgacgtgtccttcgtgggccgtgcttactccctcctccttgcaaagctgaggcacgcacctgccggaaagccaggcctcccagcttcagaggttcagggccctttgtcccatctttccccaggagtttgagatcgagctggagggctcccagtccctgaggatcctgtgctatgagaagtgctatgacaagaccaaggtcaacaaggacaacaatgagatcgtggacaagatcatgggcaaaggacagatccaggtgaggccagggcgccggggcgaggctgagggagcctccaggaggtggttccagttgaaaaggaattctggtcaaggagcctgctctttcgtgattttggttccaagctggttggaggaaagttcccaggaggtggttctcccctccctgctagaggtggctgcctgttgtggccccggaagcccaggcgtgtgcgtggctcctcaggtgggtcatctgcgcttctgcaagatggaaacaaccagctttgttttcacacgccagctttagtctatgggtggttgtttcccggaacgccatgttgagaaggactcagaggctgcgtcggtgaacgggagggaggaatgctgtgtgtgaggagccgtgtctgccattgacgggggaccggagttaggcacacggaccaggcgtttgctcttctgcccgaaagacttagggtcctgctggttggcttggggggaggggggtctctgacttgttgttagggtggccggaccttactcagctgcgttgggagtctgtggcttcgggtggggactctgggtgttagtagaggctgcacctcgggttaagggtatttatgcttctgggcgcggtggctcacgcctgtaatcccagcaccttgggaggccgaggtgggtggatcacgaggtcaggagttcgagaccagcctggccaacatggcgaaaccccatctctactaaaaatacaaaaattagcaggtcgtggtggcgggcgcctgtaatcccagctactcagtaggctgaggcaggagaatcgcttgaacccaggaggtggaggttgcagtgagctgagatcgcgcctgggtgatggagtcagaccgtgtctccaaaaaaataaaaataaataaaaacagcatttatgcctcaactgtgcttttggctccctataaacatatataggaaaaaggcctctgtgtgtgcagcctgtgtctctgaaacattctgccaattttgaagatggctgctattcaccaacctattaagagaagtaggcttgggagcgggaaaaggcgtgacgtggtggagccgctcacactcccgtctggtacctcgtgtggcctcgtgctgtgccgcaagtggtctggtttgggggtagattctgtgaccatgaaatgaagggagacggtaactgacccgtactgaggttgagcctcgggcgttgggcgtgctgagcttcttgacagtggccgcagacgtgatccaggcacagctgggcgccgagcttcttgaccgtggccccggacgtgatccaggcgcagctgggcgccgagcttcttgaccgtggccccggacgtgatccaggcgcagctgggcgccgagcttcttgaccgtggccccggaggtgatccaggcgcagctgggcgccgagcttcttgaccgtggccccggacgtgatccaggcgcagctgggcgccgagcttcttgaccgtggccccggaggtgatccaggcgcagctgggcgccgagcttcttgaccgtggcccaagaggtgatccaggcgcaggctgcgatggctccgtctacaacagggagctgaacgatgctttttagcaggaagtatttgttctctgatgcattgtcatggccaccgagtttggtatctggctcttacctgcaggtcttacctgcattgcccctggggagctgtgtgggtctcccactcgctgccccatctcaggctccagtgtttgaaccaggggccccacgtggaggggcctggcctctgccgcatacgccccgtgttcctaaacacgtctctttccgatgctgtggggcctgcaccctgcttctcagtactcgtcactagggagacagggctgccaggcaactgccagccagtcctttgtgatttaggaaatgggctctagagattcagtccctgggacctgctctctgtggggataaggggagggagccccatctccctgtccctgggctgggctagagggacaggcacggaagggttctgggctggcctgtgcagccccaggagacgcccaggcaagagacgagtggtcgccacgccacactccctgggccactggtggctgtggaatagaagagttacaaggatgtgccgggcagccagccccgtgggcacggtgggccccagcccctcgagaactcagctcccaaggcccgagggcacattcccccacctggacttcagccccattgcttccctccttctcactcagctgcacaagccccgggggaaacacaccatcagtcactgcaagcctcttggagacaggagcagatggaggcagtgggggagggaggaagccaggttatgtttggcaaaggagaaggcagagtctggtaaggaaaatgtttctgtgtttaagcttcgaggaatgttaaatgcctgggagttgatattaaaagaaacataaaccttcctgctgccagctgacctgggcctgtgagcggacagttcagagccagagtcccctggaggcctttgaagtcccccagcactcagcgtgccaaggcccggccctggccctccgctgcagaaccatctcaccagcctgccttcggcgggggaggcatgcccgaggggcgggctgtggcttagaaagtctcaccccgtgactgccctcagagccaccgtggatggccaggctgggtgacgagtccacacggagctgttcccacgaacccgggccccacggagccacggaacggtctgtccccacagcttgtctctgccttcactccggccacacatctaaggaagggagctggcactagcctctggaatgcagtctttctgcccgccggcaggcgctgaggacatagtcggaggtggctttgagatagggcccagccctcggggatattcagggggcctgtaggaaaggtaggaggaggagggcagtctctgaggcccccacttctctctaagccccctcccagcagcccatccagagaaagcaaggggccctacggcctaagcgcaggcatttgctgctgtgatgaggcccccactctgggtcgcctgatggggcagtggggcaggagtctcagcggcggggtggggtgggggaagcatttagtgacagacagacggcagcatgcgtcaccaatgtgtgtccagcacttgtgctcctggaggccgcttcccaaatgccatctcctcgtgtgatccttgtcgtgatcctccagggagaatgacagtccctcctccccatcttacagatgaggacactggggtactgaggttaagtaccttggccaaggcatctctgcgtatggtatgtgggaaaggccatgttccctcctctgtgccatgtccccacgtctcaggcctttgtcaacaaatcccccagcccggacagagggccgtggcatggctaatggcctggagaagcagctgaggtgctgctttatggcataaggtgagcgtcctttgtcttggagtcctctgggcaggggacacttgtgcctggtgcccctgggaggaaggagaggagcacgtgcgggaaagagcaggaggccgaggtgggctgatcacgaggtcaggagttcgagaccagcctggccaacatggcaaaacccctttcctactaaaaatacaaaaattagccaggcgtggtggcacgcgcccataatcccagcactttgggaggccgaggcgggcggattaggaggtcgggagtttgagactcgcctggccaacatggcgaaaccccgtctctactagaaatataaaaattagccaggggtggtcgtgcgtgcctgtaatcccagcacttcgggaggccagggcggggggatcacctgaggtcaggagttcgaaaccagcctggtcaacgtggtgaaaccctgtgtctactaaaaaaacaaaaattagccaggcgtgatggtgggcacctgtaatcccagctacttgggaggctgagggaggagaatcacttgaacctgggaggtggaggttgtagtgagctgagattgctccattgcactccagcctggacaagacagaatgagattctgtctggggaaaaaaaagaaaagaaaacagcaggaggggtacttagcatgcgtctgtgaggtccccagcccaggagggggtcctggcctccagggacccactgtcagattggaaagacgagtatattggtccatgttctccagtgagaagaatgctagatgtcagccacaatagccgtacacacataagcgagcccaggacgagcccagcacggtgctaaatgcttccatctgctgtctcaggagatcttcccaggaccctgtgggagaggaatatcatcacagctagaaagatgaggaagctggggctaaggagcccggccaaggccatgtgcccaggagtgggccagggcgggcagctggctgcagagcccatttctagatgtcctgctgcctcctgctataagaagacggaagattgtcctgctgtaagaagacggaagattgtcctgctgtaagaagacggaagattgtcctgctgtaagaagatggaagattgtcctgctataataagatggaagattgtcccgcaggaattcagaggcagaaaggtcaccatgggctggaattagggaggcttcaaggaggaggtggaacgagagcgatttggaagccctgggttttttaattccaaaagcaatgtttgtatgagaaagaaaattgcagtagaagaaaagagacttgaaacctaatcagaaaccatccttcctccggctcctccgaagcagccagtttattctgtgccttttcccttcttgaggtatacacatttttatgtagatttaatcagggcctgttttgtctgtttttctgttttcatggattattataaacctccttttctctagagctgtatggagtcttcttaagcacctttttggatactttgttaaaagtactttatattctttgtagaaatcttggtatagagcggccagcgcaattgctatgctaaggctctgtgttattccagcaaggtgcgcaggctccgcttccgcagaagggagtagggtgggagttctggaggacagacccgcctggcagggaggcacgaatgtgaagggagggtcccaggaaagtcaggagcctcagcaggggtggcggggagctgcaagcaaggccagtagaaggaatgaataaaaggaggggattcctgggggtttggccggaagaggtattttttttttttttgagatggggtcttgctgtgctgcccaggctggagtgcaatggcgcaatctcggctcactgcaacctctgcctcccaggttcacgccattctcctgtcccagcctcccgagtagctgggattacaggcgcccaccaccatgcccagctgatttttattagtagtagtagagacagggtttcaccatgttgaccaggctggtctcaaactcctgagctcaggtgatctgtccacctcagcctcccaaagtgctgggattacaggcctgagccacggcacccggcctggaataaatcttagagggcgtttaatccaatcctgttttccggagagaaggaaatggacaccagcaagggtgagcgaggcagccgcggtcacagagcttgttagtgggtgaacaagggccccagactcagggaccccatccaggtccgcttagctgggagccccccctccaccggctcttgcccctgcccccggcgtagtctgccctggctcctggtcccaggggactccactgtgtttatcctactctatttccagccttgccgctccagctgcaacctacccgctagctgattagcatattcccagggtccggcccttcttggcgggctgggcctgaggagagcgctttcccttggggccccacagctcagtttctgccagcgtccccagactggagaagggcctgagaccaagaagctacttaaacctgaggggccctctgcaccccctgcccgccccccggccctgcgtcattccctcgctcaccgcaggctggggacagcccccaccccacagtccacctctgctccctgtgcctgggaggcagctccacttccccacgtgcctgccagggcagcccctccctgggcacagcagcgctgaagaccctgtggtgggaggggcaggttccaggccaggaagggagtgtgagccaccgcgtccggcctttattctttttaaagaaaaaatagtggtagaagccaggcatagtagctcacgtggtgtagctgtggactacttgggaggctaaggaggctagagtgagttaaggattgcgctactgtactccagcctgggtgacagagcaagagtctatctccactgaaaaaaataaaaaataaaagattgtagtgaaatatacataacataaagttaccattttaataaattttaggggccgggcgcggtggctcacgcctgtaatcccagcactttgggaggccgaggtagatggatcacctgaggtcaggagttcaagaccagcctggccaacatggtgagaccccatctctacaaagattaaaaaaaattagccgggcgtggtggtgcacgcctgtagtcccagctattcgggacactgaggctggagaattgcttgaacctgggaggcagaggttgcagtgagccaagatcatgccactgcactccagcctgggcaatagagtgagactccatctcaaaaaataataatttttgggtgcacagctccgtggccataggtggatttggtgctgtgcagccgttgccagtgtgcatatccagaacttgttggccctccccagccgaaaccccatccccattaaatcataactccccactcctgcacccttagcctccagtaaccacctgcctgctttctgtctgtacgaatttgtccagtctgggaaccttacgtaggtggaatcagacagcatttgtcctcctcatgtccttgagcttcacccatatgccgttgtgtgtctgaatttcctccctttctgaggctggatacaatttccctggatgtagatgccacgtctctttatctgcccgtccgtccgtggatgtaggtgccacgtctgtttatccgtctgtggatataggtgccacatctgtttatccatccatccgtccgtgaatgtaggtgccatgtctgtttatccatccatccatccgtggatgtaggtgccacgtctatttatccatccatctgtggatgtaggtgccacgtctgtttgtccttctgtctgtccgtggatgtaggtgccacgtctcttcgtccatccatccgtctgtggacgtaggtgccatgtctgtttacccatccatccgtccatggatgtaggtgccacatctgtttatccatccgtccgtggatgtaggtgccatatctgtttgtccacccacccgtggatgtagctgccacgtctgtttatccgcctgtccatctgtggatgtagctgccatgtctatttatccatccgtccgtggatgtaggtgccacgtctgtttatccatccgttcgtggatgtaggtgccacgtctgtttattcatccgttcgtggatgtagctgccacgtctgtttatccatccgtccgcggatgtaggtgccacgtctgtttatccatccattcatggatgtaggtgccatgtctgtttatccgtccgtccgtggatgtaggtgccatgtctgtttatccgtctgtccgtccgtccatccgtgcacatttgggttgtttccacccaaaacgctcttgcctttcgttgagaaaaagaaccttgtccctgaggatggagacagcacagcctccttctctccagacccaagctctgtcccccacctgcctcccagctgtaatagatgagcaggacccgtgaccctagggcatgactggtcactattagtctcctgtagttgaagcacacagttgggccccctgcctcggccttctctccccctcccggccaagtgtccctgccccttgaccccttcacccttcttcctgggtcagctctttcctcccctggtcagtggtttaggtgcatcgaatgcagacgcagtcgccctgaggccgcgggaacaacctctggtcccttgacttcttggcatctcagtttcttcttttatttatttacttatttatatttatttgagatggagtctctctctgtcgcccaggctgagtgtaatggcgcagtcttggctcactgcaacctccgtctcccgggttcaagtgattctcctgtctcagtctcctggttagctgggattaaaggcgcccgccaccatgcccagctaattttcgtatttttagtagagacggggttttgccatgttggccaggctggtctcgaactcctgaccttgtgatccacccgcctcagcctcccaaagtgctgggatgacaggcgtgagccaccgcacccggccaagtttctttattgattcagtgggggtaactattcctaccccaccttcagcactggcttaaaggatctcacatacctggaagagccagtcggtgctgtgacgtgtgcgtccacgctttcacctgttcactcacttgtttctgtttacgatacatcctctgaatggcaggccctgggctgtgggtacaaagaatgaccaggacctcaccgtctggtaaagaaaacaagagaacttaggccaggcacggtggttcatgcctgtaatcccagcactttaggaggccgaggcgggcggatcatgaggtcaggagttcgagaccagcctggccaacatggtgaaacgccgtctctactaaaaatagaaaaatcagccgggcgtgatggtgcgctcctgtaatcccagctactcgggaggctgaggcaggagaatggtgtgaaccaggacccaggaggtggaggttgcggtgagccgagattgcgccattacactccagcctgggctacagagcgagactctgtctcaaaaaaaggaaaacgagaacttggatcgttagccagtgttgccggggttttgaggccagacagatcttgcggggctgagtctagctttctccatcgttagttgggagaacagagcgagtatctttgcctctgagcctcagcttcctgacctgtcagatgggctgtaagaggactgaatgtgagggtccatgaaaccctggacccggggcctggcatggagtcagtacgtggtttgccctaagctggcgggttcaggcaccctgtcccccacccccttccagtggttctgggtgtcacttgtccagcagccccctcctaaaggctgtcacctataagtggtcccctgggtcggggcctttggctggccgaggcagcattattttcttaagctgatggggtcagactggctttgctgaaccaacctcatagcaggggcggggaagtcaaggctggggccctcaatgccggctggcccgaggtttccctgccatgacccagcacggcagctctgagcttggcctggtgtggtcggaaacaaggggcctttgtcagcggctggggagcagcttctggtttcaattactctggagagcacgaggaagcttgcagagaacgtggggccggagcccgccagggcaggagtcaagggctcccctgccccacttccctccctctgacccccaaggggtgtcttgtccccattcgaccctgcctgagggtcctgcgcgtgcgtcctgggggccctgggttgtgagcccagagccccttccagctccggccccctctcgttcttcatggtggtactgggacccctcccaggaagatgatcgacggccggtaacgtgggtcctcagtgcttccccgttccaggcctcacgcgtgggccacactgaccacagccgggcccctggccctgagggaggccttgattcaactgggaaggaacacaggcctttccctttggttccatctctcccgtccccaacccctgccctggcactcacagcccccatagctccctgtcgtgggacaccggagtgacctctccctggaagatcagcccgcgtcggcgcccgccaaggccaggagtgcatgtcaggccccgcctcggctcctggcttaggagttccgcctccctgctgcttgccaccctcacagctggcccacgtggggctcttccctctgccgccacccccacccctgtgccagttccccaggcacatagggaccgtggaggctgagccccaggcctggttctacttcctgctgactctccacttcctcccagggccccgtgactgcagccattgtcctgctctggccctgcccaccccagctgtttcgggcacatttgttctccagcccagactcccacctgctgtccctcttcaaggcaggtctagacgcctggttctccttggagagtgggcagcagagcctgtcctgggtgggggaagtcgggggagggtccctcgagagtgcctgccctgccgtcgaaagcttttccaaacgtggggcacgaacctctctcgtcagccctgctcagctgcctccatcgcccaggtgttcctgattttgggagcctggactctgcccagtggattctgggcaggaagcatccagcaggaagcagatggaggtgtgagtcggctccccccgctcccctccacccctgggaagtgccgcctcagcaggcaggcttggcgcccgctccccctgacccgcctctgaagggtgggcaccatgcagagaagccggtccagacaggacctcaggagccgatgcagtcaggccctgagaacatccagcctcccgacagaccaaaaaaaggtgttctcagctctgggtgccgggctcccagactcagaggcacgggacctgggtttgatcttagccggccaacctcgggtgacccttcagagagtgtcctctcgggtccgtggcattcagcgaactcgccgaggtgaaagccgcagacagagattcctccccgtgagccgctaacctccctgctggcggaggctgctgcttcctcctaggaatccaaaggatcagctccagggttgtcccactttccgtgttttctgaaagcttcaagagaaggatgccacagaagggttgccagagaatttcttgagttagggctgaggctgcagatgaatgctgagcgggggtcacctttagggtgggctctgctggcctccctcaagcctgcggccaccgcagactcacagcagcccctcgtggccagccccgcccttgccgtggcctgggggcgtggacattggtggtgctgggcgagggtctaagccccagtgtagcctgtagctttgggctggggcagggagggatgggcacaccgtgttcacgccctcggaggcaagtgctgagctgccctggcttcaggaaagaccctagcgcggctggagacgcaagatgacccagacacacccgcctgacccactagacaggtgctgtcccctctcgaggctgccagggcgaacccacagccactgagcaaaagccctgagtttcccaaaggagggagagaagcagagacacgactggagctgcaggttcagcgtctgacccagaggtgtccttacaaagcccctaatctctcagacccccacgtcccccaccccgagggagagcgaggccttcgggagaactgcctctaggagctgctgggaacctaaggtttgagctgtagatgcctgaaaggagggcggtgcgctgaggtgtgcctcagattctgcctgtggggcgtgggaattccggggagggacgtgagccccaaggcaggcgaggggtggtggaaaagcaggtgtgagccagtgggccccacgtcccctcttcagccagggcgcctgctctctctgcttctgcttttatccgacgaggtgggcagggagacgtcggcataaaatttcatttggaaaaaacggcaggggtgcatcctcagcagaaaagaaatctcaccggagaccatgtgtctgttccgagctcctgatttgacagctgtggaaactgaacccagagaaaaacacagccgttgagtccacaggtccctggctcccagggctttgcttctggccaccgtgagctcggagcttgggtggaagggaggtgttcgggaatccagaatgaagaaagagcagggaggctcggcgaccccatcccaccttcaggcctcagcccctcctgcctcaggctgcaatttatggctgtgctgggagacccggccacaccccctccttcccgggaggaggagcaggcaagcagcccaggggggctccagcggtagggacagcatactgaggggccacgccctgcccactctgtccctgggtgagttttgttctagataagcaagatgttcccaaaggctcaagtgcatttttcacccttttccatgaccaaatgtgctgtgagaatcgctagggtttgccagggacgggctgtcgggacacttctcctgcagcagacaagctcttgggctgtttcagcctctcctccgtacctagaaccaccgagcaccctggcgacaccagcctgacgtggccagagagaggctggaggtcaggcagagggaggctggagctgtgtgagaagcagcacgtactcgggactgccctatgagccggcacaggcctttggggagttgggaggacagcaggttaccttgggcaggcctaggtctgggccgtagagcaactgatttcatcctgactgccttcttccttacactgtgcccatcttcaaccttgagcccaccctggacccctctcccagccccacctggatggatgggtgggtgggtggatggatggatggatggatggaaggatgggtgggtgggtggatggatgggtggatggatggatggatgggtggatggatggaaggaaggaaggatggaaggaaggaaggatggaaggaaggaaagaaagaaacaaacatagctcctagggtctaatctgccattggctgctgggtgactcctgtccccaggctgaatgcaggctctgaacattgcaaatacccagaggtatccgatgggtggggagaaaaacctagagtgagtctcagtgtctcattctgggaagacatttggccttccagtccgcaggttttggttagggtcggtacaggaaatggtcagaacacacagtaagaatgcagtgaccacagagccaccgagttgggggacactcccgtccccactcccccacagctgtccccggaacgtgccatcctcccgcccaactcgcacgccctgtgtgggcgctgggcaccccgggctcccatgctcggcctgcttgtctctctctcatcctggagcctgcacctgtctttgggcaggagccactggcaggctctctgcagcccccaaagcctcgggtccgccctgctctcctccagcaccttcttgccccccagcctcgggtccgccctgctctcctccagcaccttcttgtcccccagctctggtcctctgatgcccagccggtgccctgatcctctggtgctgagagagggagtgttcttggcagacctgagccacatcccctcggtccccatcctcagctgggtgccaggctcctcctgggctctggactctctgggcggcctcttggggctctccccgccccaactggctcccaggctatccccactggggcgcctgtggccttggtctagctggctgctcagaaaccccctctcctggagtcatttgcgctagcggataggacgaggaatcggggttcaagtgtgggctgggggagaggagcgtcgttctggtgggaaaaaggaggtcactccaggaaagcggcagctgcatttctaggttctgaggcagaaccttcctcctggtgctcacaggctggaggatttgcctggaagccgtccccacccccagctgtcaccgaggcagccccactgcagcctttgcccctcccgctcgcacagggcaggatgtgaccttttttcctcgttgatgccgccactgaacaccttaacccgattttacctcagtcacagctgtgctgggtggcatgaccccctccctaggtgtaatgcggggtcccacccacgtctccccggggacagcccctctcactccccttgcagagagcctggggaggggctgagggaggatgggatggtccactaggaatgtttttaattccaaaggcagtgacatctgttcgtgggggccttaccaccaggctctgtttatccagccgggggagtcttgcaggtcgtctgaggagggctctggcaggtgtgggggatggaaggggtggggggagcaggtgtgggggatggaaggggtggggggagcaggtgtgggggatggaaggggtggggggagcaggtgggggtagaaagggtggggggagcaggtgtgggggatggaaggggtggggggagcaggtgtgggggatggaaggggtgggggaacaggtgtgggggatggaaggggtggggggagcaggtgtaggggatggaaggggtgggggagcaggtgtgggggatggaaggggtgggggagcaggtgtagggggtggaaggggtgggggggagcaggtttaggggatggaaggagtgagggaggaaggagagtggccccttcccaggtggttgggatagcctgagctgaacccagcagagatgaggaggggtccgtggtgggctgcagcgactagaattcagacttctgcttttgctggggacatctgtcttgcacagatcttcttccacccaagaccattgactccaggaagcaatgagtcgggcttgggggagagaaggcaagtctgcgctgtccccagaggaagcccccagtccatagggaggaagggaaagatgagcgtctcaggggaagactcccaactcggctacccatctgcgaaggcacttatgtcaccatggagaccagctggccatcgttcatccagtccgagcttgctttacctagacaagtattgagcctgtggtacctaagacagatgagtgccgggccttgggaacgggattcacacggcccccttctcccccacacccggcggcagggaggggcgtgcattctcgcagtctgcaccctgtggcctgggacccagcccgagggaaggggaccataggccagtgaggggccgattctgaagttaagtcacggcaccaggagcactgtggcgcaaacgtggagagcagttataatggcatcctaccagccagttacatgacagccattgcacgtttgctggagggaggtagagtaaagctgggacccagtgagggtggatggcctttccctacagccccgagggccccacgctgacccctctcctccaggaagccttccccagttgcctccagctggaaattgtatctctcgatgttcgtggcattttgtctgtcctgttctgaggccgtaatatgggattttgtgcgggttttgtccatctgggcgtggtgcctagtaggtgcacaagtgacccgtgccaaatgcacaaatgcttgtctgcctcctgttgatggacatctctgctttcttggctgcccctttgtcaagcactgacttttgattcgtctctgtgatgccttaacccccaccccagggtcgggcacgcagccaggccctcagtcactacctctagagtgacatgagtggggccaggtgcagtggttcatgcctgtaaacccagcactgtgggaggctgaggtcaggagtttgagaccagcctggccagcatggtgaaacctcgtctctgcgaaaaatacaaaaattagccgggcgtggtggtgggtgtgtgtagtcccatctactcaaggggctgaggcaggagagttgcttgagctggggaggcggaggctgcagtgagccaagattgcaccactgcactccagcctgggcaacagagcaagacactgcctcaaaaaaaaaaaaaaaaaaatgacatgagtgggaccaagcagtggggcctgaggagtgagcagagccttcctggaggagatggctttgtggctgtgtgaaggggctgtctgggtcctcctggagccctggaaggggcaggcgaaggaggggtggagaagggtgactgaggcctcagttaggggacacaggcatgttcctacctccgtccgtctctccacctccccctcaggcggtgctggtgaggctgttgtggctcagcccccacttagcagctcaggtttgaggaagttccgtgtgcaccgtccaggggtgcgtgtgacgtgtgagccaggaagaagtggagctggtctggccgcccctgcagggacagtgaagactgaggcccggttctagcccaggcaggacgccccaaggcccccctccaccagccaggtggaagatagtccagggccagatcctgccacactagggcatcacagtgagtgacaggggtgtgggctttggagttagccagacctccgtttgtgttccagcttgtcctggccttggacacgtagctcagcttgtcagagcccttcgtttcctcagaggtaaagcggggatgctggtactgacttcatacagttgggaggggtaagtgacttaatccatgatgcctggtccctgccagccttccacgaaggacagctctgactacggctgtctctgcagggaagccacctattcctcaaaaacaccaaggcctctgaggagaaatcccgacacctgcctggctggtgacgccggatgccgagggctcgtctctgggccccgacccacctgccttggggtcaaccaagaaatgtcctgacccagctctttttcctgaatccaaagcatcatccatgtttgagtaaggcacagtgcttgtgagcaccaagggctttggagggacctccccatcctcacttggcactgtgtaaccctggcaagaactggacctcctgaccccctgtcctcacctctctagaacagggcagtaacaccaacatgacaagaatgtgaggctcacatgcagtcgggcgtttgaaagacctggttcgcggttgccacggtgcaaatactggtttcctttctgtgccgtgctggggtctgcagaggtccgaggccccagacacccctgggttttgcatagttaaacatttgggattcagcctttctcttttctctgaataccgtactctaacttgcactgttaccttgagacgtaatttgtgtcctagtctctgcggttagaaagttcactaaataaattgaaggtcaagaacaagttcttctctctctcaaggcgcccagcacggacacgggtggttgcccgtggcgtcctctgcgcccagcacggacgcgggtggttgcccgtggcgtcctctgcgcccagcacggacgcgggtggttgcccgtggcgtcctctgcccctggcagcggaaaccttttttggtgaggtgcaaagggccatggttcaaagtgacccctcaagaggcatctctggctggacgtgtgacccgcgtcgtttcgggcttttgctcctgtccctgagcagatcagtgacccgattcccactgggattcccacactaggggtctcctttatccttacatttctcacctgaggaggcttctgagtgccggtccacaagggtctggccgggtcaccaagctggctctgaggaaggtgcctggggcagaagttgggggtggggaagtgcgaccccagggcagtcagagtcttttgcccggggaggagggcagctgtttgtggccaaaatgcagcccccgcctggcccccggcccctccgcttggcccctggagcagcccggtgggcaacacggggacccagcagggagggactggggtgtggggctggtgtaaactttattgcgagggagggcggcggggtcggggaggagcagcgcccttgccagggatgaaacccggggttggggcttggaggggcggccctgggcctgggaggcggcgctcagcctgggctgcagcctcgcggagggcggggaaggagggatgcggaggagggaggagggaggagggacgcggacggagggagggagggaggggagcgcggggagggagggagggagggaggcgagcgcggggaaagccggcgggactagggaactagcgggactggcagccgggactgagcgctccacaggcgccttctctccagcgccgcgtcccgtcccccccggcatgaccgacgtcctgccccagcccgactgcagcccgaaggcggggcgcgaacccctggcgctggaggagtcggggagcaagcgcccccccaacaccggcgcccggctctggggccgcgtgcgcaacaagctgctccgaaacaaggtgcccgcgggggctggaggttccggggggtgggggctcgggggcgctgcggggctcggggggctgcgggggctgcgggggctgatggggtcccgctcccgccccctccgtggagtcccgggacagagctggggtctgtgcgcgtccctctaagtggcttgaacttgatggcgaacgctggggccgcccccacccggaccctggcgctcgggcatctgcccctgcctcgggagaagggaggtttcttctcggcaggtggaccctgctttccactccgggagtgcaaacagcgcacggggagacgcctgcctctgggtctatgtcttgccgccctgttcagcctctacctgatccctgcatccagcgggccttgctggctgcccctttgctgaggggcgccgaccgcagcaccgtctgccgtgtgaggtttctctgtgcaggattgtggggaggggagatgctgccgggtctgggggctcgaggcttcccttcagggaccacccatctgactgtgggcccagtgcccgccgggcaccaggcgttccgtccatgtgccagggcagaccgccggtgcccctgcagccccagacctgagttgggattaaaatctgagatagaagccgactgtcctgcagctgggcaggctgcctcggggctggcttggggccctggcatcaggcacgtgaggaagagccagacccagcgcccagcgcacaggaagtgctcgataactctgcagatcaaatcaactgtccgagttagctgtctcagagtgccagtccggctggccagggctgggcccatccatcaagagagcaacaagggaggccttggccagtccgtggtggggatctgcagctcctcctgaggctcacaggacctctctgcaggctcttactgccagccggcattgaggctcctggcatcagccaggacgaagtgatcttgggctcactggcccctcgttttgtttcagctcctgccatggggcatacttgacctcccagaggtgacatcagccctggaaagtgctgggcagggcagcaacttgagctgtactgcactggcccctgtgtcaccttcagcctccctggggactgggctagcagagccctgctggccccagctgctgccagagcccctctgtgctgaggcagctgtctgtgcccggcagcgtggactcatcccctccccagcccctgctgaggccagcaggcaccagcccagagctcaccatccatccccaaacgtcagggttggcaagaaactgacctggcaggttccgggtccagcgccagccaaacagggcgcttccagtttacctgcccctttgaggaggtgcctggtgggcagggggcaacttttaaacctgaggtcccagactttcagttctttccctatgcatttgtggccggcagaactgagaagccccttcaagaattccttagctgggtttgcctctggcagtgcctggtggctccgtgtctgatggggatctctgggcaggggtggtggccaggcagacgccgggctattgagctgctgagcagttggcgtcagtgcagctcagggtggccccggccctgggctgctctgtgtgacgagcgattccatcccctaacgtgtgctgtgtgccacagtgtgtccgtgtcgtggacgcaggggtcagcgctgtggcggacggagggacgtctgccacagtgtgtccgtgtcgtggacgcaggggtcagcgctgtggtggacggagggacgtctgccacagtgtgtccgtgtcgtggacacgggtcagcgctgtggtggacggagggacgtctgccctgtgcttcccacctcactgtgcgcaggccagcgggtgagcagcagagtcaaagggccaggcctcttgctttctatcctcagccacattaacctggcattttcctgcaggagcttcacagttgggccgaggggctgggactaggcagtttcgtttcggtggggtaagggaagggtgcctggtactgcccagactggcaggagggattgcctcattaactcctcgttaactttgccctgagtgatgctgtgggtgcgagaaacaccggtggccctcctgcttccactgacctgaaggttcattaaaggctggaggcggggcgtgactcatccagggctgggattaaacaatctgttcagatggaaaggtctcatgatcagaactgagcctttaaatagtgcagggcctctggtttctgggggagaggaggcagggacactcacggaggatcctttgggtaccagcgggggtccctgtggttgggctgttcttgtcaccggaggagagttcaggggccaaagcctcattccagcccctgacttggcagtcagctttttgtgcgagtgtttagctgggagacacgtggcatctgggtttgtgggttcagccagggctctcggtattgaacttcgcgtttctacttttctttccttttccctgtttgtttttttttttttttgcctcaaatcacactcaagtagaccaggcccggtgccttcctctccctcccatccttccctcttctagattcttggttgagctttggatgggaaggggctgaattctagattctcgcttgagctttggaggggaaggggctgaaggaggaacccccccaccctgcccccgcagcatccccttgtgggagccgtgaggaggctaagagggcctgaagggaggccggtccagaagcatttgtctgtcggggaagttgaggcccttatagagcaaccaagtccaagacgctcctgacccagaccaggccagatgctggccggcggtggggactcaggctgagccggcagggtgtaaggagattgagtgcagcttcaggtgaccttgtctctgccctgaagcacagccatgtgggtctgagaatcccctacttccaaagagctcctcttaagctggacaccggcactgctgacccccacggtgagtcccgtgttctgtgatgggagctgctgcctttgcttcagagaggatcagaggtgttacctgaggaagggcggggtggagagcccctcttgggccattcggggaagcttcaggctcatgatggtcttagaagaaggtccctttcttggatcacctgatgtcaggagtccaagaccagcctggccaacatggagaagccccgtctcaactaacaatgcaaaaattagccaagtgtggtggctcacgcctgtcatcccagcactttgggaggcagaggcgggtggatcacctgaggtcaggcgttcgagaccagcctggccaacatggtgaaaccccgtgtctactaaaaatacaaaaaaaaaaaaaatagccgggcatggtggcgggcacctgtaatcccagctgctagggaggctgaggcaggagcatcgcttgaacctgggaggtggaggttgcagtgagccgagatcatgccactgcactccagcctgggcaacagagcgagactcggtcttggggtggggggaggaaagggtccctttctttgtcagcttgatcgccaccgcaggacaaccccacccctcacagagcctgtcgtttattccttcttgatggtaccaggtgtgcagaccacgtgcacaccccagaggttcactctaccactcacttggccatcgagggtacacaggtgctgggtacaagatacagatatgtcttgggctcgtctactttattttataatccagtctgggcgtcaggaaagatctcgcagccttctgcaatagaagtctggcctggcccggctgcccaccgcccttccttgtttcccggtgggaagaaagcttcatcgtgcgtcttctctgttcacacacacccccatagcgacccctcagccacagacaggggactacagtgctgcctcccccgagagctggaggcccctacaccagcccacctcttcctgggcctatgtgtgggtcctgactgcggccaggctggctgacaggttggcagtggggtcgggcgaccctccctcttttccacagcacttacccacctgccgagtgggcagacctcactgctggggcctcatgagtactctctgatctctctgccaggccagctcccaagaggcttgcttgagtccgcagagcgggaaccctggactctgagaatctgatgaaggttctggaggccactcagacacagagccaccccatgcacacactgtgtgcgacttcagagggggctgcagacatcaaggcgggaaccctgctctgagtgaacttggcaaggtgccgcttcttggtacctagggagggtagaagggcgctggtcctccccggcctccctgcaggccacagacggcttggccagccagcggtgctgggcgcggtgccccagcttttggatggctctggaccagggagaggagaacctgccaatcaagggggttcctcaaaggccaaagctgcctgagcccagtgttgctgtagtacccagaggcaatgaggccccagacattttggaaggagcccccaagcctgcaggtgtggctgggggagctgccccaggcattttggaaggagcccccaagcctgcaggtgtgagtctgggggagctgccccaggcattttggaaggagcccccaagcctgcaggtgtgagtctgggggagctgccccaggcattttggaagcgcccccaagcctgcaggtgtgagtctgggggagctgccaggtgttggccacagggcgctggtgctggagaggcctggccctctgctgagtggcctcgctcactgcccaggtggttgggaactggtcagcaggtgctgttctttgacctcgtttcccctgtgaactcatgctggggcaggaagatgtttgtgtcctgacggccccccagcaccttcgaggaacagacagtcccctgcgcctgtgacctgcctgccccaccctggggagaaacgcagcgtcagtcctgggtccagtgagccgtagacccttggccctccaggatgggccctggagaggcgggaggggcccgtggagctggtcctgggcttctgtagagaggccaggaggccccaggatccccacagagacttccccagtcccgcttcaagacagcggaaccagctcctgagccgaaatctggagggatctcctttctggaccgtgaccccagccggggctggtaccgatgaccggcacagccagagccgtgacatccacagcgcccttcccatccgatgcctggatgccgtggctgtgctcggggaggcctccggggtccccagcccctcaggctcatgtggcacaaggtgccagagaagacagggcgccaggccggtgggagtcaaggtttcccatttttctcgtctcagtctgctacttaactgctgtgtgcccgcgagtacatccctttgcctctctggttctctggtatcagctcaatgaaggagctgaacaggatgatctcctggaatccagttcatgtgatgatcttggccatgtctcaagattcctagtcctaaaccttaaaccctgagcaccctgggagagtctgtcacagggctgcacctgggccaatgccagccattcagtggacacgggagcagggggtttagtgggaacacagggcttcttgagccctgtcctgaagcagccccggcggggagccattgtcacctccttcccccatgccccagttggttcctctggcctgtgagtattgccggagcaccttccacgtgccaggcctgcaggaactagggacacagaggcgcccgagacagacgagaccctgtctgcaggaggagtccgtcaacaaatgagatccttgccggtcagatgagtgctgtgaaaaaaataaacacaactgggtaacgcagtagagagtgacggggggatgcctggcttgagaggatcacttttgaacgaagatttaaatgacaagaagaattcagccataaaaaacctgggggcagtgcattccaggccaaagaaccggcaaggtccacaccccgaggcaggtgtgctcagaggcagagggggacagtgtggggcgttacgtggggtcaggggacggcggccaggcgacgtggggccctgcggttcaggacagggcctttaatccgaatgcagtgggaagccgcggggtgttcaagcacagttctgtgacgatatgttttgaacacgtactgtacgaggcatcattcttagcctgtgacgcaactgaggtgacacttacaaggtgctgttattcacactgtttatttatttatttgtttgggttcttttgtttttgtttgctgttgttgttttgagacagagtcttgctgtgtcgcccaggctggagtgcaatggcgcgatctcggctcgctgcagcctccgcctcccgggttcaagcgattctcctgcctcagcctcctgagtagctgggattacaggtgcccgccaccacgcccggccaagttttgtatttttttttttttttttttgagacggagtctcgctgtcgcccaggctggagtgcagtggcgcaatcttggctcactgcaggctccgccccctggggttcacgccattctcctgcctcagcctcccgagtagctgggactacaggcgcccgccacctcgcccagctaattttttgtatttttagtagagacggggtttcaccgtgttagccaggctggtcttgaactcctgacctcaggtgatccacccgcctcagcttcccaaagtgctgagattacaggcgtgagtcactgcgccaggcctaaatgtgttttgaattttgttttacatttttaattttttttttttttttttttgtgggagtctcactctctcgcccaggctggagtgcagtggcaccatctcggctcactgcagcctccatctcccaggctcaagcaatcctcccacctcagcctcccaagtagctgggtctacaggcatgtaccaacatgcctggctaatttttgtattttttgtaaagacgaggtttcgttatgttgcgcaggctgatgttgaacttctggcttcagtggatccacctgcctccgcctcccacagtgctggattacaggcgggagcccccgtgcctggcccagactgtttttatatatgaggaatgaggctcagagagtgactcagatgaagtcacgtgagtggcttagccgaggggcgacgttcagaccccggccactcagcctcagcgcaggctctcacccgcggtgtcctgccttccgtggccggttggggttgggctgcgtgccccagatgggagcgtctggagacgccgggctcctgcccgtcaggcatcagtgtggtgcccgtcctggcacgctgtgcatagcaacaggcaagacggttcttctcgacgacgccactgaacgtgagactcggagcaaggcaaggcctgggaggggccgctcagagctgacctgggccctggaattgctggagcccctcacgtccccggcagcaagctccatgcccagaaagtgttctgggcccgggcagggagggtgaagctggtatcagagaaggctgttgatgctgctttttttttttttttttttttttttgagatggagtctcgctctgtcgcccaggctggagtacaatggcacaatctcggctcaccgcaacctccgcctcctgggttcaagcggttctcctgcctcagccccctgagtagctgggtttacaggcatgtgccaccacgccggggtaatttttgtatttttagtagagacagggtttctccatgttggccaggctggtctcgaactcctgacctcaggtgatcctcccacctaggcctcccacagtgctgggattacaggtgtgaaccaccgcgcccagccctgttaatgtttcttaaccactccaggtccagctcgaggcttcagagcccatggaggtctgacaggtccttggccttcccgtggcctccagcgtgaagcttcctggtcaggaccacagaaggcctctcatcttggactttgacctctgagggcgcccctttcctttcaggacagggcctccgtgttgctttggccctggcctgttccttttctcaagagggccccactgcccctgcccttgccactctggcatcctcgacctgccctgggctggggcagggccggcttcctggctggtatttgtagcccagttctgagctgaagctgaagcctccaggctgcctgcacagggaggcagtggtggggtgggctggccctgaggaagacggagccctaggccgctgggggagatgtgcctggctgtggggcctccaagagcagcccaggtttggattttgtctgcttctcctcaaggtcagccatgcccagcccgggggctaaaagcaaagtgggtgccagggcaggcagaggctctggagtggacgtggggccggcagaggcgctggagtggacgtggggccggcagaggcgctggagtggacgtggggccggcagaggcgctgtagtggacgtggggccggcagaggctctgcagtggacgtggggccggcagaggcgctggagcggacgtggggcaggcagaggctctgcagtggacgtggggccggcagaggctctggagcggacgtggggcaggcagaggtgctagaatggacgctggggaaggcaggttgctgcgggtgctaagaggctagcctgccttggacaaaagcgtcgttcagagctgctaatccccttcctcccatgaggcttggggaacttcgaagttctctggtgttggaggggaagccagccgaggccctgggacacggcatcagcccgagcctatctgtggctggcctgggtatggcaggtgggcacaccttggctgcaggacaccttggctacaagggagcctggctgaccctgcagggtgagggctggagaggcggagcctgcctggcctagcagtgtggatgccaagccatgggaagatgtgtggagagtttatggagcctggcccggtgtccccaacccagctgctgagctggaagccaggggtaggtcctggcagcccctccctctctgccctgcctctctcggagtcgctcggagcagtcacgttgacggaatcctccggcgcctcctcgagggaggagaggcagggtcttggcaactcccgtctcccccgttgccagcttgccagccccgccgtgcctctcacgcctgtggtctgccccaatgacaggccggcttcggtgtcccaaggggacccagccctgagcgtggggctgcccttgggggagggcaggggaaagccagcccgggctgccaccgtggccgctggcctgggagccccaggaaacgtgcccaccctcagacccgatgcctggctcagggcctgggctccgcggcccctccagggcaggcgtgaaatgtgcccacacagctccaccttccacgtggttccctgtccgggggccacttgcactgaggtccttctggagtcattttctgtttttttttttttttttttgagacagagtcttgctctgttgcccaggctggagtgcagtggtgctatcttggctcactgcaacccctgcctcccgggttcaagtgatttccggctaattttgtatttttagtagagatggggtttcgtcaggttggccaggctggtctcgaactcctgagctcgagtgatccgcccgcctctgcctcccagagtgctgggattacaggcatgagccaccgcgcccggctgggagtcattttctagcgttcctgtcccacctctcaggaacagatttaccacctttgttgtgaagaagcattttttttttttttctgccgccaggctggagtgcagtggcacaatctcaactccggctcactgcaacctccgcctcccgggttcaagcgattctcctgcctcagcctccccagtagctgggattacaggcacccgccaccacgcctggctaatttttgtatttttagtagagacggggtttcgccacgttggtcaggttggtctcgatctcctgaccttgtgatccgcccgcctcggcctcccaaagtgctgggatgacaggcgtgagccaccgcacctggctgaagaagcacttttttttatgaacctctgcaaccccctctgagggaaaccctcccgcattctgggatgccggggctcagagggtggagggtagaagagcgccagccgtgagaggcaggatggggcggcccccgagggcagggctgtgcctggaggcagggctcctcggggggtcagctcctgggcggtgggagtgaccgagtgggctcctgagggaagcggctttcaggaaggaggcggaggcctgggagctcttggggccctggcaaatgtggtcttcagattcccgtcgtccagtgagcccctggatcacgtcctgagtggcgtccactgaaggctgcttgggacctctgctcccccctccactgagacccccagtggccagttctaagtcccacctgccttgggcagggccaccacaggccccttactgtggattaaagggccctgggtgagggcttgtgggaggggaggtggtggaaaccatctccgaagaccttggggcgagctgcgtgctggagtggagagtgtggcccagcaggcaggagcactgggttggaatgggggctctgccacctccgagggagcaggagtggagaccggagggagcgtgcccctgaatccgagcacggggagctggccgggagcagccctccgggcagaggcaggagaaatggggtcacctgccccagggggtgagaggtgagccgagaggaagggctgagaccctcaggggcatccccaggatgttcctgaaactcagccctggaggacgctcaggtgtgcgtggagcaccctctgccctggagcctcaaatcctctccccgctgcggggccactttgctgattcctgccccaaacatgaggtcacttcggtccagaaaggcgaggcgacctccaccagccacctacgggattcttggcagagaatccacgctcaccttcgggtcttcactcctgctccctcggaggtgacggagccccatttcaacccggtgcccctgcctgctgggttttcgccgcaggggacctggtcgtctcctggacatgagcccccagcgccagcgtttctctttgggagaggcctgaatgcgcagtcatgatttgaccaggcgaagtgcccagacaaagagaaaacagtcggccggatgcaggggctcacgcctggaatcccagcactttgggaggccgaggcgggtggatcacctgaggtcaggagttggagaccagcctggccaacacggtgaaaccccgtctctactaaaaatacaaaaattagccgggcgtggtggctcgtgcctgtagccccagctactcgggaggctgaggcaggagaatcgctcgaacccgaaggtggaggttgcagtgagctgagatcgcgccactgcactccagcctgggcgacagagtgcgactccgtctcaaaaaaaaaaaagaaggaaatagttgagctgctctcagtgaccatgtacggcccagtcgtcgacccctggcccagtcgttcgtccgccttttggctccacgatgttttgcagcctgtttctgtctcctgcctgtggcccaccttggggaggccccagtgctcgtgtgcccctggtggtcttcccagcctgacccttcacgagctccctctgtctccctgcttcaggtgatcagacatcccccaagtacctgctcccctgggcccatggaaggcacctgtctgctgggaccagagggtgagcagtcaggtgtcccatccaccaacgtcccaggggccagcccctccaccccggtgctaatctcatcaggaaatagcacagtccacatttcccaggagttataaatagccagcgcagttgcgggcagcagcgtttctctggaaaatgtacgctgtgcctctccctccctcctctgtgtttaaatgatatcctgaaatagacttggtttctggaggctgatagcctcctgggaaacagagcgtcgttgtcagggcaccgtggggccaggcaggcctctctgagcggataccagggccacacctgcagcaggcaccagggccacacctgcagcagataccagggccacacctgcagcaggcaccaggaagatgtcagggcttgaggggcttacagcttaggaaagtgcccctggcccaggcctggcctcagaaggggctggagtgtgtgagacagcagcaagtgtcgcctgggaggctgcagagggtagatcttagtggagcaggaaggcagagaggacccaaagtttcccactgtgacctggggctctccgagaaggctctctggaggaggcggggcgagaactgggccttagcatcaggaggtgcagtcctgggtcagatgtgcccaggttgaacctggcagctggagcggaagtgatgggcacgaggcagcgggagggctgtactgggggtggcctcccagcaccaggtctgcccaccgggtcgggacacacaccaggaggcccgatgttgcctttctgaggaagcagcagttacagcagctgcgggtcatggacttcacacattctgcagtttcagcagagagggtgctgggggccttgattttgaaccccagctctgacttcctaggtgtgcactgggtaaattcctcactctcgttaagctgcagcatcctcatctgtgagatgggagcggctatgagagcttaaaccgcatatgtctgctatcatgatcatgaacgcagatgctgtgtgtagaggattcatcagtgtcagacttgcaggaagagctcgagataagtccgttgctctcactcttccataacagccctgtgagtcaggtgtggatgcctccatgaggaaattgaagttcacggaggtgaaaggccttgcccgagtgcgcacggttgaatgggagactcagatcagcctgcctccaaatcctgcacactccccccgaccaggttgtgtccaggtccccctgagacttgggaagggaccattggctcagcttcctgcagaagctgccaggaggcacccagtcgtgggaagctggggcggaggaggggctgtgggtgaatcggaccaggggccatggaattggcctgaggcttatgctgatgtgtggagagacctgcctcaagaaggggtggtctcaaaacatcgaactgcgccccataaatacatacaactgcaatgtgtcaattaaaaaataagggcccgggccaggcgtggtggctcacgcccgtaatcccagcactttgggaggccgaggtgggcgaatcacgaggtcaggagatcaagaccatcctggctaacacggtgaaaccccgtctctactaaaaatacaaaaaattagccgggggtggtggcgggcgcctgtagtcccagctactcaggaggctgaggcaggagaatggcgtgaacccgggaggcggagcttgcagtgagccaggatcgcgccacagcactccagcctgggcgacagagcaagactccgtctcaaaaataaataaataaataaaaaataagggcccacacagtggtacatgcctgtaatgccagctcttcaggaggctgaggcaggaggatcactgaagcccagggcaacatagcagcctggacggcacagtgagaccctgtctctagaaaaataaatacaggccgagtgcggtggctcacgcctgtcatcccagcactttgggaggccaaggtgggcggaccacctgaggtctggagttcaagaccagcctgggcaacatggtgaaaccccatctctactaaaaataaaaaaattggccaggcatggtggctcacacttgtaatcccagcactttgggaggccaaggtgggtgggtcatttgaggtcaggagttcgagaccagcctggccaacatggtgaaaccctgtctctactaaaaatacaaaaattagccgggtgtgatggtgcgcacctgtagtcccagctaattgggaggctgaggcagaagaatcggttgaacctgggagacgggttgcagtcagccgagatcacaccactgcactccagcctgggcaacaagagtgaaactctgtctcaaaaaaaaaaaaaaaaaaaaaagagggcatggccgctccagaatgtttcttccaagggtagcatctcagttgacaaagagcatttgattcctccaccctgtgtggctactgctgggggacagagctggggacagacccaggcccggctccgtgtccagacgagatgaaggaactacgagggacagcctgtgtgatccaggagggtttgcaaagaacagaagcagcttagaggggagagaggtttcgggaaagtaaggccagagctggggcttcctttgagaccctgtaggacccctgcctccagccgggctggtgatggcctcacgcttcccgtgtgtgaagaggtgcccggagcagtggttctccctgaggggcacttggttctctgcacacacccaacttctgtctcctgttctgggttccatcccttctctgggcagggcgaacccagtgcagacccagaccccgtcggaggcttgggtaccacctgcccccagccggtgtgtgggtgatagatgtgggaaggacctacatcgagctgcaggaagcccaaggctgacccagatccagtttcccttccgtgatgacagtggcctgttatagcaactgcgttcaaaccgtggcacgcacacctcagagtgcacagagacgttctgagggcgacgtgggcaggagagttttcaggaaatcagtttgcagattctcagctgccataggtgctattgccagaaagccatctgcctgagagccagcatctcgccatcctgtcctctgcagaggagaggcctgaggctggctgtcggggcttggcccggggtgcgcagacctcctgggtggggaacagaggggcttttagaaatgttggggtaggggccaggcatggtgggtcacacctgtaatcccagcactttgggaggccgaggcaggtggatcgcctgaggtcaggagctcgagaccagcctggccaacatggtgaaaccccatctccactacaaataaaaaattagctgggcgtggtggcaggcacctgtaatcccagctactcgggaggctgaggcaggagaatcacttgaacccgggaggtggagcttgcagtgagccgagactgcaccactgcactccagcctgggcgacagagcgagactccgtctcaaaaaaaaaaaaaaaaagaaacgttggggtcagtgttcagaaagtaaaagactctagtggccacttagaacctttcaaaagtcaggtggtatccagttctttgccttccacaaaactgatggaggactcaattttcaactgagagatcatttcaagtaattttcagtaataggtatatatgcgatttaaggcggatagcatggagagaggttaaagaatggtgtaacgcggctgtgataaaactcttttcgacctcatctacttctttatgtgaacaaaatgtttcattgttcacatatttcttgttcattttagagacatggtcctacattgcccaggctggtctcgaactcctgggctcaagtggtcctgtggctgggagccacagcacctgcacatctttacaacaaaaccagaaacatgaaccaaattgatgctgagcctcgtttcactctagcaaaaaataataccctatagatacgcgaactaaagcaaaaaatgttccgcccatctcattgagagagcattccaccaaaaagttactctgctacttaatatttattaaaatgtataatgaggccaggcgcggtggctcacgcctgtaatcccagcactttgggagaccgaggcgggtggatcacctgaggtcgggagttcgagatcagcctgaccaacatggagaaaccccatctctactaaaaatacaaaaaattagccgggtgtggttgtgtgtgtctgtaattccagctactcgggaggctgaggcaggagaatcgcttgaacccaggaggcggaggttgctgtgagccaagatcgcaccattgcactccggcctggacaataagagcgaaactctgtctcaaaaaaataaataaaatgtatataatgtgtcggcttactttttttttttttttcttgagacagggtctcactctgtcgccaggctggagtgcagtggtgtgatcttggctcaatgcaacctccacctcctgggttcaagcgattcttccatctcagcctcccaagtagtagcttggactacagtgcccgccaccacacccggctcacttttgtatttttagtagagacagggttttgtcatgttggccaggctggtctcgaattcctgacctcaggtgatccaccagcctcagcctcccaaagtgctgggattacaggcgtgagccaccgtgcctggctgtctttttaattatgtactgccaatcatggtactaactaatcctgaatatattttgaatatttggagccttgtggtctctggaaatttttgttttcaatgtatacagattttttttgtggaagcaaaatgtaatggtgaataaaggacttgaaaatataaaaatataaactaggacaacattctttaggagaaatggaatagaaacaaattcaaggagagaagatccaggagctctgtgagggaaagaagagcttgtttgtgtagttttttgttgttgttgttttttttgagacggagtctcactctgtcgcccaggctggagtgcagtggtgtgatctccgctcactgcaacctccacctactgggttcatgccattctcctgcctcagcctccccagcagctgggactacaggcgcccaccaccgcgcccggctaattttttgtatttttttttttttagtagagacggggtttcaccgtgttagccaggatggtctcgatctcctgacctcgtgatccgcctccctcggcctcccaaagtgctgggattacaggcatgagccaccgtgcctggcctgttttcttaatattgaattttgagagttttatataataagccctgaaattgggtaatattagccctatagctgtgttctttttcaacattgtttagatgttttttctttttttttgagacggagtctcgctctgtcgcccaggctggagtgcagtggcgcgatctcggctcactgcaagctctgcctcccgggttcacgctattctcctgcctcagcctcccaagtagctgggactacaggcgcccgccaccacgcccggctaattttttgtatttttagtagagacggggtttcaccgtgttagccaggatggtctcgatctcctgagctcgtgatctgcctgccttggcctctcaaagtgctgggattacaggcgtgagccgccacgcctggcctcgtgtagtttttaaatggatgagtgtgggtatcacgtcgctggggtatttagatcccactgaatccatgagaaggaatgatgtcacacttttattttaggatggcaatattgacatgattttggaaatcatactctttgcaactatttaaacttggaaatgttcagattttgacttcagaaagtgccagggagcgcacagttgctcagaattagttcgcaggtgcacaggcagacgggcgcgaaggcccccgagttacagaaacagaacgtggaacagtcctgtgtgagggttgcctctgacctcccctggggtccgcacctccctgggctccagcccgagcctggggacttcccctgtggaggatttgcttatttgggagccaatggcttgacccaagttttctccctgaatcttcccagcaatcccagggaggcaggttctgttgcagatggaataactgaggcttagtgagtttaaaacttgccaggattcaaacccaggcagcctcctgtgcgcgggctcctgactcttcaacacctccacgtggatgggctggttccctcctgatggacttgagcgcctcctaatcaggtgcttaccttttgtgagcctcagtttctgcatctgtgaaatggggtaataatacccatgtcccgggctggcagccaggagtgcctaacagggtgtgccctgcctcccccacggtgggtaacagagtgtgccctgcctcccccacggcgggtaacagggtgtgccctgcctcccccacggcgggtaacagggtgtgccctgcctcccccacggcggccacaggggcctgggggctagggtccccccaaagggttgatttccaggtaaacatcagcttatcccagctgctcacttccgccttcctgactgtgtagctggctctgagcagtgctgacccacggggagatctctggcttggcctccgagctggcacctctctcacccacattctctctctgcagctggacccacaaaccgtggagaccaagaactggcacacggacgtgattgagatgaacggggtgagccggggatgggaatgatcagtggcgtgagccgggaggtggaacgtctgtgcagcaggtgggcagcccggccctgtggctgctcctggggccgctgtgccgcctcgacctccccgcagcccagccccctctcccctcctgcccacaccctgcccgctgctgtcctgcaggtgttgtgttgagggagacctgggtgtgagctagccctcatttgcagtcttggggaggggacccctgtgttttgggggcattcctcgggcactcacaccctggggaatctttacctgcctcaccccccaaccagatcaaagtggaattttccatgaaattcaccagccgagatatgagcctgaagaggaccccgtccaaaaagcagaccggcgtcttcggtgtgaagatcagcgtggtgacgaagtaggtgctgcctcgggtctcccagtcctggcgtcggtgccccgggtcccccccagcccgggccccccagccctccccgccggtgcccatcctggcacctaatcagttaccccccgctcggcggtggcagatggccggtgtggatctagagtggccgcagaggcgctcacaggacacttcagaagcacgcgagccagcacctaaacgctggaaggtctcttgtgagatcccagatcgtctgctcctcgtaacaagcgggaagctctgtcagccgggggcctacgtttgggctcggcaccaacggggactggcggcccctcgggaaagggcacgtgtcccccggttcaccaccaccctggccccttgtctcaggcctgacccacctcctcatgtgggctgcctgctgggcctcctacaagcatctgaatctgggggacgttctttccctagagtctcggccttaccttcccaagttcccaaggcttctcctgcccacgtccgtcgatgccccttcggcaggcctcgggtgggctggctggggtggggtgcggtggcctctttctctgccctgcccctgcccccgccccagctctccatcccaaatgctagaagctctccagggtgtgtgtgtgctgggtgggggttgctacgggagagctgtcgtgggggctgccctccacccatcctcacgctccaccccaggcgggagcgctccaaggtgccctacatcgtccggcagtgtgtggaggaggtggagaagaggggtatcgaggaggttggcatctacaggatatcgggcgtggccacggacatccaggcgctcaaggccgtcttcgatgccagtgagtctgggaggcccagccggggcaggtgtggctgtgtctgagcaggctggtgggatggacaggagagctcgggggaaccaggagcctccctggagaggaggcttgctctgcttcagagtccccgtggcaagtgctttctcttgtaatcccctcccctccaatctcttgtcccttgctgcaggtaagcaactgcagaaactcacaagggccgactcacttgcccaggatgacccaacttgtaggttttggttctggacttaaaactcagatctgactccagtgtctttcttgctagttcctgggtgcctggtgagccgcagggaaagagctttgagcctgcacctgctgtctccagggccccaggtcccctctggggcagtgctgcctctgcgtgaagcccaccatggtgaggcctgacctttctggtttctcctccctgctcctgctggttcaggtgcagcagccacataccccactgtcaagaaacctgcactggccaggcagggatgaatccgtggggagcctggagtggaggacggggtggggcctgggaactggccggcgttggtgcctctgtgcagcctagaagctgaggctttgtcggaacatgcttttacgtgtgaaaagtgtgcaatgccttccagagaggggcttagcgatggagaggttccagtcggaaggaagctgcaggccacatggtatgaatgtggctctgaactctgggtgatggatttcactccccaaacaccctttcccaagcagccacagcagatggcccccaggctatctctccctgttcccccaaccccgacccacagagccgagtcacagacacctgtgggccctctctacatcctgctcttccaggggagaccagaaccagagctggagtgggtgggggctgtgtcaggatgggtcgggggtggaacggggctgctggcccagctaaggctgcctgacctcggccccacccctgcagataacaaggacatcctgctgatgctgagtgacatggacatcaacgccatcgccgggacgctcaagctgtacttccgggaactgcccgagccgctcctcacggaccgactctacccagccttcatggagggcatcggtgaggccctgagggctcctaggactgggctgggccagactgagccaggactccctgcccggagaagtaaccagcaggagaaatatctgtggcttcctttgctggctgaccttcccagtgcactggggcctgtggctgaggggtccgagggtgaggtgtggcctgctgggacctggtgcagacactgggccctttctcgcctgcctcttgcccctgatgtccccatgggcagccccttctgcttcctatttggacgttggcctcttgcttggaagctcgagcatccagggaagactgccctgaggtgagtggccagaagccagcatcccagaaccaaggaggaggctggcttaagccatagggcactcgagatgggttgtgctgagccttccagcgggaccacacaccgtcccgtcacctctgcggagggccccggccagcaggccttccgcctccacccacctgggccaaacccagccccaaggaatcccttcagccttctctgctcctggggcagactggagcttcagcccccacggaaggctgcttgcacccacgctccagcagcagaaggggtggagaaagagaatccaccgctggcaggatatgtccctactggcttaaccttagccacacagaccagggggtgtcctgttacgagacaggggatgccccagcacccaaggcctatgcagtcagctgcaggaagggggtctgctcccaccagccggcctcctggctgagttaccagtcgtggtggggcctcctggaggaagcagctgctgacagcccacccagacaccaggccctcccctgtggggtctgctccccaaaggcctggaagcctgggctctctcccgcaggggcccacagcctcacgaccacaggggccctggcggggagccccaggagccaaacgccacactggcccttctctcccacagccctgtcagaccctgctgccaaggaaaactgcatgatgcacctgctccgctccctgcccgaccccaacctcatcaccttcctcttcctgctggaacacttgaaaaggtaacggggagcggccccaaccccacctcctcagtccctcctcatgaaaaggtaacggggaggggccccaaccccacctcctcagtccctcctcgtgaaaaggtaacggggagtggccccaaccccacctcctcagtccctcctcgtgggcgctggcctccatcgggctgtctgtggggagtgagagtttgctttccaagttcttgcactcatgtttttctgttttgagaaatatttgggtcccgtaaccagtagtaacctcaaatattgaccatagaatgctcagaatggcagggtgagagcccaggactacaggcaggttttataatcagtgggtcccaacctactggtggttcattcaacgaatgtagccatttctagatgcagtggggggtggacagcagtggggggtggacagcagtggggggtggacagcagtggggaatggacagtagtggggatggacagcagtgggggaatggacagcagtggggatggacagcagtgggggacagacagcaggaggatacattgtaagccttgatgcaggtgctgcttttcagttacatagagacgtgtggactgtgttacagcatgggttgtattgtgggccacagtcaaaaaaggtgaaacccactggtcttggcccacacctcactagacatagggaaactgagtccccacaccaggcggagacttgcttgggttagtagcagacctgtccttagagccctcaacttccagatcctaaattcagacccttcttgccttcccaccaccctttctagtcaggtccaaccaagagtggctaaagttggttgtacttgtagcaaagttcagaggtcctcaggcttgcgtggggaggtggtccctgggcgtcccttaaacccacctgcacgccaggaccggggagccccctcagactgctctgcggaacaattcttccctgagctcagccccagctcagggccaggccccccgctgcagctcagccacgccaggctcgggagagccagtggagacctggacgcgcccggggctggtgtcttgtttttcccatcatgaaacatttttcctctggtttggccaggactagagccccaaccaattccgaaagcatttggcaagccttgtggggaggagtgggaagggaaaattcattcggcttccaccctgggaactgggcacagtctgttcccacatctgggcccctggctggaccgtgtgcgcgcgtgtggtgaggggctggccccgctgcacagctgcctgttggcatcacagtgtttgtttgcctgtttccaaagcaggcgcagccacagctcctgcctggagggtgggaatgatggtattgagggtgagaggcgctgcttagggtgggtgggtctcagcccagaaacattttttgagactgaaggagaaccagaggccctctgatatgtttgctgaccctgggcctgcctggacaccagccctgatggcagctcctgctgttaccccagggaagcatcgcagagcatctggcctgttgagtaagagaagcaggagaggatccagagggaggacaatcctgggtcccacgaggcagacggagaggcataggaggcagccctgggtcccatgaggcagacccttccggagaggcacaagaggaagccctgggtcccacgaggccgacctttccggacaggcacggggggacagtccccgggctcatctggaagtagggctgctcctgccccagcacagctggcagagccccgggtctagctagtgactcctgctgggctccaggccctgcctgcctttctcccctgccccacccaccttaactcttcttttgggccacttagcacatgagaaagcaacagagcggtaggtcctggaggcagctaccggggttcaaatcccagctctaccagttgctggctgtgtgaccttgggcaagtcacttaacccctctgtacttcggtttcttcatctacacgatgggggtgacgataatcatatttacctcaaaggactgcggcgagtgtgagttgttccagggagttttcagaacagtatctgctctcaggcaagggagctggagttggcatctgtgggctccctggctctggcagttcaccatcagttcagggggacccagcagctggagatgttagcacagaacactggcacatggctggggccctgctctcctggatgagtccccttcccccgggggaggtccccactcctaggagacagagacgaggtgaccccttccaggagtccttcaggagttcccacagcgaaggccaagggtcctggagctccgagtggctgctgaggaagggcttctttcctccccatcttctccttcttagggttgccgagaaggagcccatcaacaaaatgtcacttcacaacctggctaccgtgtttggacccacgttactgagaccctcagaagtggagagcaaagcacacctcacctcggctgcggacatctggtcccatgacgtcatggcgcaggtaccctggcaccgcccgggcccgtggctggcggagggtgacggtcccatgacgtcatggcgcaggtaccctggcaccgcccgggcccgtggctggcggagggtgacggtcccatgacgtcatggcgcaggtaccctggcaccgcccgggcccgtggctggcggagggtgacggtcccatgacgtcatggcgtaggtaccctggcaccgcccgggcccgtggctggcggagggtgacggtcccatgacgtcatggcgcaggtaccctggcaccgcccgggcccgtggctggcggagggtgacggtcccatgacgtcatggcgcaggtaccctggcaccgcccgggcccgtggctggcggagggtgacggtcccatgacgtcatggcgcaggtaccctggcaccgcccgggcccgtggctggcggagggtgagaccagccccttaggaggagagagaacagctcagagtccccacacctcttccctcgtgggaagctgggttgatgggctatggggtgtcaccagggaggcaggactgtagacacttctgcccctcccaggccaaaacaaacatgtgagcctagaccagggcccagagatgctggctgcattctcaggagggcctcagtctcagaaagcaagcccaggggtggggagatgctgggcccttgtcctcatgggtggaagctctgaggttgcttccaagggcgggaggcttccctgggattcctgcaagacccagagcaggggccggactgtggccgcctcaggacagagcagaagcttatggccaggttggggaagtggccctaggcccccgaccctctgccccgtagcaccttccacggctgcagaaaggcaaacacacctgggctccccaggaaggggcggtggccggagccagtctagggagtgggaggggcaacacaggctggagtcagcaaggacgaggcctaggacagggagcccagcctccgccttcctgtctccccacaggtccaggtcctcctctactacctgcagcacccccccatttccttcgcagaactcaagcggaacacactgtacttctccaccgacgtgtagcccgaggcagggtggctgcgggcgggtggtggaaccagcccctccagcctggggtccaactcagacttgaaagactgcaatagaaaactcccaaacccagcactccagactcgagggaagccagcttccaagaactggaatgcgtacgtcttttgtgccaccttgtacaaagccggctgcccagccccagcctcaccaccgcatcccacctcctgccctccatacctctagttgtgtctgatgctccgtgctgttcgggaattgttttatgtacacttgtcaggcagaaaaggtagtgaccggcccggcgtgggcacacagacagcccgctttgttctttcatttcctccagcactttctttccgcctgagtccagcccaaggccttttattttgcgctgtgtaactgctgccagcttctctcttggccctgctcccagatggcggtctcctggcagcctcccctcagtcttcctccacccgctcttccttcccagcctgcctgcatgcatgtgcacccttggtcttcgctccatcgccttgaaagctctgaagaggccctgggttgccgcggcagcagtggtctgtttgatgctgccgtttgccgctgccggcccctcctcagactccgcctttgggagcacacctgctttgccttgctgcctgtgcaaatgttggacaagcagacacactcacactcgtccccagcttagcacagagctggagcgcccatttctggaattttccgtttgggaatctccacttctggggtttacctgttcggcctcctgtctatcagtgaggcatctctgactgtttcttctactgcttttcagttcccttccctgctgttctatttcctttgagtgtaaagactcacaggtgacctgctatcgagatagccagagggtcaggagagaatgggggaggaggcggtcaggctgctgaggaaacaccacaggctgaacgggggaggaatgcacatgccacgctgggtgtcccgggtcgcggggaggcagctcagctcttaggagcaagttgtgggggcttttcaagaggggccaggcttcctggagggtgactgatgtggccgaagcaggtgtccaggcaggtaggctgcagccaggagctccctggcaccgcaggacctcgtggtactcttgccttagattttacacacactccacagccaagcactgccacggtcctccaggacctgggaagcaaaggcacaggcccacggtggccagccattgtggtgccgccccagcttctggatacagccttttgggtaaacactgggaactccagaagttgtggggagagtggggaatcagacagccgcctctaggggctgggttctgctggggcctccttgttggtgctgtaggcacccgccagggagcagggacccgacttgcagacgcattgcccggtactaggaaggagtgaggtgtgttcccaccgtacacttcccacacgagctgcggctgccagcctcgggccatcagcctaggagagcagatgcagctccaggggctcgacttatagccagttacagctccccggctcttctgtgtggcagagcgtcgtttccgggccctcagggctggggagctcagttcccattgcttgtgctcagggctgagtcttaaagaagggtttgccggccctaacgctgcagcgcgtgcgcggtgagaggccctttttgagcctgtttactcctgtggccttgggcagaacagtaaatactctgtgcacggaggaaagacatgcccaagaggaaggaagtactgaccatcggctgcctgtgagcagcttagcaaggagcccttgctccctgggaaaggcggtgaacttgagtctaaagatgcagtgcctggcccttcctaaggtccctgcctggcatccgagtgtcggtgtgtggcacagaaggctcctgcttgcttccaaagtgatggacaggaaggggcagagtgagtcacggcccagactgggcaccttcgcgtctcagcctcagggagccccacagccccaagctcgctgaggcaacgtgagaacaggctatgggaaggctgcaaaggctgagaaatgcaaaggctcatatttataaatcccacccccagagtggggagggtcaggtgccagacctggactaaactgcaccaaggaaacacccagcagggtctcctgtgagccggggaccatgcagcccgaaacctccagtcactgcgcccggcaggagtcaggagccagggactgtgcagcctggaacctccagtcactgtgcccagcagggtgggctgtgcccagcaggagtcaggctaagaaacgccaggtctgcctgttcttgctgggcaatggctgatggctgccagtttctgctgatacacaggtaggatgggacccttcatgaatatctgactttaataagttggtaaggatatatttttttgtctatgttctgtttcaacttatgtagattattataaattgatgtaaaccacgtgagaggaaaatgttaataaaaaatgcaaagccccatcatttgcacaaaactca

SEQ ID NO: 437 - DNA, 1311 bp, Homo sapiens
  source 1..1311: mol_type = genomic DNA; note = NC_000019.10:53258292-53259602 VN1R2 [organism=Homo sapiens] [GeneID=317701] [chromosome=19]
tctctctctgccttggctgccaggcagggaagggccccctgtccagtggacacgtgacccacgtgaccttacctatcattggagatgactcacactctttaccctaccccttttgctttgtatccaataaatatcagcgcagcctggcatttggggccactaccagtctcctgctttgtatccaataaatatcagtgcagcctggcattcggggccactaccggtctccgcgtcttggtggtagtggtcccccagacacagctgtcttttctttcatctctttgtcttgtgtctttatttctacactctcttgtctctgcacacggagagaaacccaccaaacctgtggggctggaccctacactattccaggtagttgttggaatcctggggaatttttcactcttatattattatatgttcctttactttaggggatacaagccaagatccacagatttgattctcaggcacctgactgtagctgactccttggttatcctatctaaaagaatcccagagaccatggcaacttttgggttgaaacattttgacaattattttggatgcaaatttcttttgtatgcacacagggtaggcaggggtgtgtccattggaagcacctgcctcttgagtgtcttccaggtgatcaccatcaaccctaggaactccaggtgggcagagatgaaagtaaaagccccgacatacattggtctctccaatatcctgtgctgggccttccacatgctggtaaatgccatttttcctatttatacaactggcaaatggagcaacaacaacatcacaaagaaaggagatttgggatattgttctgccccacttagtgatgaagtcacaaagtcagtatatgcagcattgacatccttccatgatgttttgtgtctggggctcatgctctgggccagcagctccatcgttttggtcttgtacaggcacaaacagcaggtacaacacatctgtaggaacaatctctaccccaactcttctcctgggaacagagccatccaaagcatccttgcattggtgagcacctttgcattatgttacgccctttccttcatcacctacgtttatttagctctcttcgataattccagttggtggctagtgaacactgctgcactaatcattgcctgttttccaactattagcccttttgttctcatgtgccgtgaccccagcagatccaggctctgcagtatctgctgcagaagaaatagacgattctttcatgatttcaggaaaatgtgaattggctgtcttggtttatgttcggccactgatgcactc

SEQ ID NO: 438 - DNA, 265624 bp, Homo sapiens
  source 1..265624: mol_type = genomic DNA; note = NC_000018.10:23689443-23955066 LAMA3 [organism=Homo sapiens] [GeneID=3909] [chromosome=18]
gagcgctgtcagttcctgatccggctggtgcccgctccagccgcggcaggttccagagctgagaggccacccccacgccgcgggcttccagcgcgtggagcaaggggagcggccccggcgccgcccatatccccggctgcgctagtcctggcgctgcaggtccgggaggcgcaggcggagagcggcggtgcccccgagcccctctgcggacggctcaggcgggaggaccccgcgcggctggatggcggcggccgcgcggcctcggggtcgggcactggggccagtactgccgccgacgccgctgctcctgctggtactgcgggtgctgccagcctgcggggcgaccgctcgggatcccggggccgcggccgggctcagccttcacccgacttacttcaacctggccgaggcggcgaggatttgggccaccgccacctgcggggagaggggacccggcgaggggaggccccagcccgagctctactgcaagttggtcgggggccccaccgccccaggcagcggccacaccatccaggtgagggcctcggagagagccggggtgggcgcgccttttccttcccgcgccggccagacacccggagaagggatcgggccctttcctcacgcgcgctagtggctccgggcgactgggaagggcagcccccatccccgcgcgcgagggcccacgacccaggagcgatctcgtggaagcaccgcaccggcaccaccggcccgaggcgaggagggggagcacgcgaggtgacatgaggctgtggtcaggttcgggctggtggaggggaaagtgtgaggctgcgctctaagagatgcaggcgcctcggcccttcccgcctccgtcacccacggagcgtcccgccaggcttgagtcctcgagggttcaggggcgcctcctgccccacctcccgggccttattcggagaagtcggtggcaattaccttctgtggtgtattttaagagagaatttttaggttataacagcggtatcactctaatgttactgaaaagattcacttcactgcactgcctgaagtgccaccatccagtcattgggggcgaatgagaccttaggcggacagagatagaaaggctctcagagatccgagcctcaccgcgaacacccggggcaaacgacattgcggtgcatgttaagcagcatcttgcagtgcctggcccttactcacaggtctcagccaggcaagagtgcagtggtgcgatcacggctcacggcagcctcgaactcctgggctcaagggatcctcccgcctcagccttgggcgtagctgggactacaggcgtgcccccccgtgcctggcaattttttttttttttttttgagacagagtctcgcactgtcgccggggctgaaatgcaatggtgcgatctcggctcactgcaacctcaggcctggcaattatttatttatttatttatttatttatttatttatttatttatttatttttctgtagagacagagtctggctattttgcccaagctggtctcaaactcttagcctcaagctgtccttctgtcttgacctcccaaaggggcaggagaatttgaatccagtcctgacttcaaatcctggacactaagcccaaattgcctccttcttctgcaaagtattgttgaggaacaggaagtgggaagagggagcgattttggagcttgggttctaaaagagcaaggttatcattgggtgtctagattagtgttttagaaactcttttgaccatgcacttccataaatgacaagttgttgaacatctagtgccatatgtgcttatttacttataaactacatgcatgtattatattgatatgtgttgtgcatattttaaaacatgcaaaaacagaaatctaaaagacaaaataacaatgatgaaaatatttttaccatatttatatattatctatattataaaacatgcaagaaaagaaactaaaaatataaaataacaatgatgaaaatacttttaacagtcctcaaataattttgctttctctattttatgattgtgtgtttataaacacacaaatatgcaaatataattgtgtgtataattatttttgagaaatttagtttagctcttataacaattcagtttttaatttaattttatttttgagacagggtctcactctattacccaggctggagtgcagtggtgctatcttggctcactgcaacctccacctcccaggcccaggtaatcctcccacttcagcctgccaagtagctgggactataggcacatgccaccatgcgtggctaatttttgtatcttttgtagagacaaggttttgccatgttggccagactggtcttgaacccctgggctcaagcgatctgcccaccttggcctcccaaagtgctgggattacaggcatgagccactgcacccggcctgattttatgttatacttgattttagtggttgttatagctgaaaagatacctaaaaaaatatgtagattcaaatggaagaactgcattgaccagtcacataatttacagagttcagtgcaaagtggaaatgtagaaccccttgttaaaaaattattttaaatatcaagatggtgacagcacagcattgaagtaagcgaggggcccttcgaagtgagaggccccaagtgactgtacacgtcttttgctgtctaagctactaaatcatggtactatagctctagctctgccccatccttcggttagcctaaaaatttttagaagtagaaacttggccggtaattgttcacttccaagttgtattcagcattcctagtagaaaggtattacgttttaatgttttgtattgttttgtttttgagacgaagtctctctcgtctctcccaggttggagtgcagtggcacggtctcagctcactgcaacctccgcctcctgggttcaagctattcttctgcctcagcctcccgagtagctgggattacaggcgcctgccaccacgcccagctaatttttgtatttttagtagagacggggtttcaccatgtcggccaggctggtctcgaactactgacttcagatgatccacccaccttggcctcccaaagtgctaggattacaggcatgagccaccgcagccggcccgttttgatgttttaaacaatagattcaagactcactgcaaatcttttgttggaaaatattaatgttagaaaattttgtttccatgagaaaagacttatttctgtcattctgatgcttgttttctatatgccttatatattttttggctactctcaattcttctattattgtcttctggtttaactgatttttaccattttgattctctcctcatttccttttctatatatatttagtttttttttagtacttattctgaagattacgattagtatcctaaatatataacaatccagtttgaattgatactagcttaacttcaacagcatcccaaattctgcttctgtataactctgtcctttacattattgttgcaaattacatctttatacatgattgttcattattatgaatttataattattgttattatatatgcatttgtcttctaaataatatacaaaaaaagcagttaaaaaccaaaaatatggagaggcatggtggctcacgcctgtaatcccagcactttgggaggccgaggtgggcggatcgcctgaggttggacgttcaagaccagcttggccagcatggtgaaaccccgtttctactaaaaatacagaaattagccgggcgtggtggcaggtgcctgtaatcccagctactcgggaggctgaggcagcagaattgcttgaacccaggagctgagatcgcgccattgcactccagcctgggcaacagaggaagactccatctcaaaaacaaaacaacccaaaaatacaataatactggtttttatgtttacatatgtagttacctatactgttgttctttcttagtatggctttgaattactgtctagtgtctttttatttcatcttgaatgactccttttagcattccttgtagagtagatctgctagcaggattccctcagctcttgagagtgagactctgtatcaaaaaaaaaaaaaaaagagaaacgtacagtgcattatatactgaacacatttgccatgctaaataatccactggcatacagacttctatagccttctatattatagaaatagtaacttgttttagtactgttttaataactagatattatttgtttaaagatacttcttatcagctcaaataatattttggggggagattttaatttttaaggttaatttagtggcaataatacatttttccaaatcatacatttattcctggttgtaatttaggcatttatgaaacctttgttaactctctgcattctggaaccatttgcctagttaggaaaagatttactaagtggcacctgagtggtctaagtcaatggagctgcctatggttgtgctacatacatggattcctggccaagcgggtgagtagggtcacctgggcagggctgcatctgctcagaggcagggagtctttttctgctttgcaataaagaactgtttgaatgaggtcataggacactgattagatccctcatgtcaacagggtggaaactgccctgaggaaagccagctccttgagtcccatgtgccctgccagtttctcagtgtcaaaaacatattgtattccctcagtggttttcccatcctagaagctcagaaaatacatgtggagttaataaatgaatattaactggagaataatacgggtttaaagtgattatgcacatcttaattgtgagaggtgggaaatagaagtgagttctccattactttcaagttgcaccatatactgtgcatactgtgtataggagtgataccaaatatagggggcagaatggtgagaaggaggaatggcctagtaatgaggggctttgctcccctgcttaatgcagggtattgatttaacacacacagacaacacttactgatgcttggcacaggtctaaagcatattacacattgagttcttgattgtcacaacaatttatgaatgtatgaaggaggtacaattagcatgcttcttttacaaatgaggaaactgaagcgcacagaagttaagtgatgtgtccaagatcacacacttagtatgtggtaaatccagatttaaacccaggtactctggctgcagaattcacgctcttacccgctatactactgtcacagacatgctaactactccttcctctgagttccagctaaactttgcgttgccttgctaatgccacttatcaccttggagccatccattatcatgtctgtctccttattaggatcatgagcttcctgagggtggggccctgtcttcctgttcatgtctggacagagtattgagatgccccatagagtagaattcctgtgcaaagtatgctgcactgtttccttgtggaagcttgtcttagacaccccatcaatgctttttgaagaaatattcaaaaggcaacaccaccatagaatttacttatcagagcaacaccctgatggaattgctgtttgattttaaaagtacctgaatttcaacaatctgtcttctggaagacaggtgtggccctgctgtgtctgatgcagtggctgaacccaatgcccaggactggactcccagaagctggaagaggcaaggaaggatccttcctctacatatttcagagggagggcagtcttgctgacaccttgattttggtcttgtagcctccagcatggtgagagagaaatttcagttgttctaagccacccattttgtgctactttgtatggcagccttagaaacttaatgcagtaactttagcttcaactcagttaaccagcagttgtattgaccattcagtgtatgcgtgttatccctgtttgggagagcagcagagaggggaccctgcatgaggctctgtgtgtagttctagggtcctggtttgtgagactttgcaacctgataactcaaaatgtggcccctaaaaagaatgagaagagctctaggctgaacaaatatttagagatcacgcacattatgagtcatccttaaggccaggaatggtggctcatacttataatcctagcactttgggaggctgaggcgggtgaatcacttgaggtcaggagtttaaaaccagcctggccaaataaaaaataaattagctgggcatggtggcgtgtgcctgtaatcccatctacttgggaggctgaagcaggagaattgcttgaacccagaggtggaggctgcagtgagccgagatcacaccactgcactccagcctgggtgacacagcaagactccatctcaaaaaaaaaaaaaaaaaaaaaaaaaaaaaaaaaaaaaaaagaaatatgtgcacttctttatggcagtaagctgtgttgtgtgtgtcttacccctgatccttgcttaatgcatgtggggtggcccgagtttgggggtggtgcatacctgtgagccttggatccaccttttgaacagagcccagtggttggataattcctccactactagtgagggctcagagggctgctttaggggagggcagggatggaattgtgaaatgaaagctcctattccctatgtcgtgggattggctctgcagagactaaatattgccaaacatttgtgtgcatgaaagacattggtggcaaagattctatgcaagatagtttgcacagtaatttgatgagaatgcaaacatttcagacttttaaattttcttacatgtttccaggctgctttcctattttattatgaggacttagcatttactgtatctttaatgtatcattgaattctaaatgtttttgatgaactagaaaaagtagcagcatgttctgggagacttcattaggaaaatcactaaataagcttgttataaacttattgagttctctttcttttattttatttcattatcttctaggtaaacttattagacttttctttgaataaaaatatagctgttaaagtaaaattttctgatagaaatgctaagagcaggtgaaatccccctgttttttttgagacggagttttgctctgtggcccaggttggtgtgcagtggtgcgatctcggctcactgcaacctctgcctcccaagttcaagcaattctcctgcctcagcctctcaagtagctgagattacaggcatgtgtgaacacgcccggctaatttttgtatttttagtagagatgggtttcaccatgttgcctaggctggtcttgaactcctgacctcaagcaatccacttgccttggcttcccaaagttctgggattgcaggcgtgagccactgcaccctgatagatgaactctttattctctttctctgagcaggtgctggcttagaagagattctttcaacctttcctatacttgatgctacctgcagcatcctcattttctttgatcacttgccttggttctggggtgtggtctttctctggctactccacatgtgactgtcactgcagcttaagaaaattgtagctgaagcaagccacagtagaactgcctgactaaatatgaggaagaggaggccaaggacctttagaatcattacaaagatgtttgtaagcagcggttctccatcttcatgggagattaaataggaaggagggtgtaatgttgcagcacaaagtactgggatttgctacagagaagaacttcctgtgctaagcatgctgcaccactgaaatgatttctgaagaggagggtgaggacttcatctttaggtcaaaatcctctgtgtgatcttttagcccccaacatttgcaattacaaggctttacttgggaggcctcatgggggaaagctgccctccccatgcctgacttggtgcacagtgaatgcattgcaattttctggagggagttttggtcaacgacgcaggctgtactggctcaggagcctctcatatacatatctgcattcctgacccaggagcctctattctgggggctcccttatcaggagccttggctgaggctcttcccaggtgcctccactgagacttccttactggtacaccatacaggttgggaatccctcatccaaaaatccaaaatcccaaatgctcccaaatccacaactttttgagtgccagcatgacgttcaaagaagtgctcattggagcttcctggattttggatttttggattagaaatgcttaactggtaagtataatataaatattccaatacccgccccccgccccaaaaaaaaatcccgaatctgaaacatttttggcctcaagtatttcggataaaggatactcaacctgtgtcagtttgctcggactgccataacaaagtaccacagcgagggtggcttaaatagcacagctggattttctcacagctctggaggcttagaagtctaaggcatgggtatggctggtttctgctgaggcctctctccttagcttgtagacggccaccttctgcctgtgtcttcacatggtctcttctctgtgcgtatgtgtccccaactcctcttcttatagggattccaggcgtattggattagggcctgccataatgacttcattttaccttaattatctctttaaaggccctatctcaaaatacagtcctattctgaggtcatgggggttaggacttcaaactatgaatttgtgggagggggtgggtggggtggtggggggaaatggaacactggggaaccagcctgtttctcttcttcttcttttttttttttttttttttttgagacggagtcttgctctgtcacccaggctggagtgcagtggcgcgatctcggctcactgcgagctccgcctcccgggttcacgccattctcctgcctcagcctcccgagtagctgggactacaggcgcctgccatcacgcccagctaatttttctatttttagtagagacggggtttcaccgtgttagacaggatggtctcaatctcctgattttgtgatccgcctgccttggcctcccaaagtgctgggattacaggcgtgagccaccgcgccccacctctcttcttttttatctcttgcctgcactgtcacagtaagttaataaagtctgggttggtgcttcatttggactcattgtcttaattgaccgctttaacagctggaagctcaacagaggctggaagactgacttttgaggtgattcttaaagtagattccaatcaactaataagaatggtgctgcctggagacaagcgtgcccacgcacttgtgggtaatgtccattcacttctatatttagcaaatatttattggcatctactatgtgccaggtataggggatggtgatataaggggctggaagtacagttacaaggcagaaaagacccctgtcctcactgagctaacctcccatggggagactgtagccgttgagtaaatataataattgtaggttgttattttgccttagagagaataaacaggattctgtgataaaaattaaagaggagatgatggccagggtgcggtggctcacgcctgtaatcctaacagtttgggaggctgaggcgggcagatagagagagagagagagagagagagagagagaaagaaaagaaaagaaggaaaggagatgatgttggtgcagaaacctgagtaacctgagggttgagaggaaggcagcctcacaacgaggttgggagagggcgaccctggaggcctgaggcccctgaggcgggaacatgcttggtgtgttccaggaactcagaaagccacatgactgttgttgttacacgttttgaatgttgtccctgagtgagacctctgtggtctttctagaatttatacatatttcactttatttttgtatgtattgataccctttctggtcctcaaaaatatttaagtgagtgataaaactaaaaagctgagatgagggaattgggaatgtgggaaaagaaagcaggaaaaagtgtaattgtttcataaaggggttaaaataataactgaaatagaactgagagggaaaaacctggtttgaggaatgcgtcaggttggggtcagactatctccttgaggaaggtgtctggttctcatagatcagtagttgatggttgattgtgtaaactaccaggaaagacctctttcataaatctaggctaagaggaagtactttgggtttggggtattaattgggcaggcctagatgtggcctggcccacattgtaaacttgcgtttgccttggagcagatgacttacatatcattaaagctgccaaacaccccactgacagtaatgtcagaggcgttcgaactagagagactccatcttgagtgacagctaggaaaataaggctgggacgtgctgggctgcattcccagaaagctaggtattcctagcctggagatgcttacagttaggggaatagattgataatgtttactaagcagacccagacttgggagtgtcctaatatcctgatatcttgagaacaaaggcattcctaattttgctttaaagataataatattgattctcgcaaaatatagtaattacgaaaattaatcctttatcacaaacccttgcagcagagcacatctccccatgatctttttttatcctatataaaatattttatttatccttatctaaagatccatgatctttttttgtccttaccttacctaggtaagacatgttcctcctcttactttcgggaatgccctactctgtttatggagtagctgttccttcaccacattactttcttaataaacttgcttttgcttcgcactgaattctttcttgcacgagatccaagaaccctcttggagcctggattgggccccctttcctgtaacagtaacatgccaacactacacatagggaacaggaaaatagcgagagaagtagaaggaagaggattgcatggaaaccgttgaaaaattgggctttaagacttccagaaagaacttcttgagttctttcaagagggaaccagttggtaccaggagcctaaagtagatgtacagtgtcataattaagagtatgggctttggaattaatagagctggctttaaatgtattccttcctaaagacatgaccttgagtgagttatttaacttttatgagacttggtttcatcatctgtaaaatggggacaccatacagttattatgaggattacatgaggtaaatcataatgcatctggaacacagttagtgtttaataaatggtaacttttttcttttcttttctttttttttgaggcacaatctcactctgtcgcctgggctcgagtgtggtggcatgatctcagctcactgcagcctctacctcctgggctcaggtgatcctcctacctcagcctcctgagtagctggaactacaggggcgtgccaccatgcccagctaatttttgcagtttttgtagagttggtgtttcgccatgttgcccaggctggtctcaaactcctgggctcaatctatcctctcatctccgcctccaaaagtgctgggattacaggcatgagccaccacgccctgtcataagtggtaactctaattaaatattgttgagaaatctattttggtaagaaagtcaaaataataagacactgataaaaggggtcagatgtgatgaggtgcggagattaggagaatgaggcattgttgcctgggaaacctctttttgaatggaaataaatcataatgaagaaatatattgtgaccaaaagaataactctcacttcctttttcctctctgatttggccatgataagcaaggaaggtgagtacctgagaagtctctgaaactggtgagactctgcccagagatggaagagctgagttgggcatgagtggagctttctggccagagcgggcaagtggtcagaagttaggagctgagaataggttctggggaggccctgctcatggaacacatggatttccattagggtagaagaagcgagtctagatttcattagactgtgctttctaatagctgaatttagtgacacaggtatcagtctgcaattactgccttccttcctgtggttggttaaaaacttctgagtaactaaatatagtttctgccattttaatttatgaatcaaatcaactaatactgagtgcctaccctgtgccagataccaatctaggtttatagtagtgagcaaaattgatgaagccctgccctcagagcagttataatccaataaagaggataatttaaaaaggaaatgatttgcaatttccgctgaggatgaagagaagcgggtaggggaatagacacggagatagagggcagcactgctttagatggagttgctaaggaagactgccgaaaagagacttcagtctgggagaagcgtgttcctgggagagcgaacagcatgtgcaaagaccctgaggcaggagcagccttggagtgattgagaaacagccagagagtcagtgtgggtcaaatggagtgagtgggggaaaagtgcgaggttgtttcaagcacatttgttttaatcctgatcggaatgatctagaagaaatgagatgcagtggggagagagagaggagagagagagacagagagagtgagtgtcaggggacaggagcttctccataccaacggtaggcaggtatatgggtacagatgttgtgaggtttgtagattatgaagatgagcaagttaagcaaattcacgaggtgaggggaagggggtgggagtttgaggagcaaggagaatgtgtgaaataacttccaggagagtgaaagagtaaatatagtgaaatattacatcaatatagaaaaacacagttctcagttgtctatggagggagaagactaacggcaagcatcttcctttctaaaggaagcttctttcttctttttctaattttagagacagcgtcttgctttgttgcccaggctggagtgtagtgatgtgatcatggctcactgcagcctcaaactcctgggctcaagggagcctcagcctcccaagtagctgggactacaggtgtgcaccaccatgcccggctaattttttttgtgtgtgtgtggagaagggggtgtcactttgttgcccaggccggtcttgaactcttaggctcaagtaatcctcccaccttggtctcccaaagtgttgagattataagtgtgagccaccacgcctagcttaaaaatatcctccttacctggttgtgtctgactcacaggctggtggtgcccagcaggggagatacatgttttctggccaagcccaaatctctggtgcccaaatctctgaggcacccgcagattcagatgctacacctcatacggctagacagctattccccctcttccttgtctcttgtcttcccttctccagcatcccctcttgggctaattctcaggttctatcttggctctaccacttagaccaattgctccacctctttgtgtctgtttccctctctataaaagggtctgatgcttgtgtctaccttgtagatttgtcatggaaattgagttaatgcatataaagtgcaaggggccacgtctggcacatggatgtttccttttgtcattactaccatcaatgtagctacttctatgactgctgcagcactgtctatggctagtggtgcacccatatgtgccagtcgtcactgcctctgaggttcccagactgcagtgggcagaagaatcctttggagtgcttttataaaattctgatgcctagctcccactagagatgctgattctaagtccagaagcgtctgcatttccagcaagcactccagtggttccaatggtggtatgatcacaccacctggtgtctacttcatggatgacatctcatttaatcttcaaaccactgcgtaagataggcagtattaacccattataataaagagaaaatggagctcaagggagtctacataattcaactaacgttccatagctgtgactggtagccatcaggatttgaatttccatctattctactccaaaatgtagagtagttaaatgagttaaatggaatgagttgaaatgaattcaaaggactcccccacctagaatttggagttttgcagacaattgcttaactgcttctttttaaaaaggggtgtgtccaacatggcacatgtatacatatgtaacaaacctgcatgttgtgcacatgtaccctagaacttaaagtataataataattaaaaaaaaaggtgtgtgtgtgtgtgtttaaatacctggaaccaactttgagtcccttgttttagctctctcccaaatccctatctctaggaaccaggcacattagagatgtcatcttccaccccctggtgccatgaaaccttgtgtgtgggagtcgcagagctgggtgttcaccactcaccccagtatatttaggatacgttcaggaaattcacagaacacttgcccaaatcttcagtaaccacacctaaatgcctttgtgactctcaaaagggagaatgctctgaacaaggtctttgcaaaggagcaattccaagttaggaagggagcccaggatgtcctatacatcaggcctccagctggcttgggtttgggcacttgagacaccatggcctccggaaccttagtgagtgatggctataggagcagaggttcgtggaaacatgaatgtggtaatttgtagtggggctgttgatggatgaacgttggttaaatgcttatcttgccgggctttttgtgcctgccacaagggcgtgcatctgaacctctgccagacagatttctctccccagctgggtctcttcccatacatctgatagtgggcaggtgtatatagagtcatataattgtcattccagggctgtttcacaccgtccaaatctaagacagcaccttttgatgtagctcacaagagcagcttggccaggaggaaagtgttccaggccataagtaacattatcaggcacacacgcagttcctggccccagcacgacctagctgtgtggtttgagatgaagcacttcacctctctgagctgtttcttcatctttaagttttgaatactttgatataaagttcacagtgttctggagattaagcaaagtaaagcacagtgttcctttgctgggctcccacaccccagtgctagcttgccccagcatcttttggtaatgtgcagtggttgagttacttctcttgtctcccactaactttctttagggacagatccagctcttagtgtttgtttgtttgtttttaccacagtatctaacatagtgctctacccatggtaggtaatttggataagttgaataaatgaatgaatgttcaaacaaaaacccccagaaactacgttagggagcactgctataatcatcctctagcttcttggaggaatatagtatttacattgtgaattctaaaggctttttagttaagaaagatcataaaaaatgttaggaactaggagagactacttttttccatccttctgaaaaagggtaggtcattctgtgggcttctggtttattctctggagactgccaaatttggagctcaactctgcttagttgtttatgggaacagtcctatctcctttcttcatagccccttccattacattttctgtttcccatctgaataggctaataatataatagccttggtgcaattccaagtgtgagtcccttgttctgtttatctttcagtgttctcatctctctgtctagaatggcatttggtacagagtagatgatcatcataggtttgttgcatggatggatgaataattgaacatgggagttctctgttccttttcttctctgacttctatcagtttttgccctgctttatttatttatgggtgtttttaaaatatcggacatcaggcacggagttagattatggattagtcataacactcagtttatgagatatttatatacacaaatatatattgcatacatctgcccactaccagatgtatgggaagagacccagctcgggaatgtattatcatgacatacacacacacacacacacacacacacacacagacatatatgcatatatatatacacatacacacatatgcacacacacatacacatatatttgagacagggtctcactccatcacccaggctgtagtgcagtgatgcaatcatggctcactgcagcctcgacttcccaggctcaggtaatccttccacctcagcttcccaagtagctgggatgcatgccaccatgcccagctaatttttgtattttttgtagagacggggtttcaccatgttgcccaggctggtcttgaactcctgagctcaagcaatcctcccaccttggcctcccaaagtgctaggattacaggtgtgagctactgtgcctggcctatatatgtattttaaatagtaataagcattcatgaacttgctaccaaaaccaaacatagagcttggataataatttatgtctaaatgtatggtctgcccacccccattccctctgtctcttacattctggggaaataatcatcccaaatcttttattaatactttgcttttttagtatagtttttattacatctgtacgtatttcgaaaaagtaggtgctttttattttgcttgctcataactttataaaaagtatatcatgcttttttcacttaatattatattgctgagattcatcaatattgtttcatccatattgtttcattgtatatattcatttactcattattgcttatatagttattaattgtgtgaatataccactgttagttcatccaccctcctgtggctgggcaattaggttattcccaggattttgctcttatgaacagtgctgctgtgaatagtgttgaatataataccatcaaatttgtgcaagagtttctttttggtttatgagtttgagagtagaatgccgtatcataggaaatgtgaatttcaactttaggtggtaatactaaaacagtttccaaagtttttgtaccaatttatactcctactatgtcttttctaactctggttatcatcaaactttaaacttgggtctactgaatacgtataaaataatattgcattgtggtctgccttgatcactaatgatggtgatggtgaacatttcttgaaatgcttattatgtttattgtgtttatatgtgtttcctcttctgtgaaatgcctacttttgcccgttttcccattgaactatttatatttttcttattgatttgtaggattgttaggaatttggtatgtatttctgttgagagttcttcgttgattttaagttctttgatcagttattgattcttgtgtaataaactacccccaaaacttaggggcttaaaacaacaacagttttggccaggtgcggtggctcacacctgtaatcccagcactttgggaggccaaggtgggcggatcacctgaggtcaggagttcgagaccagcctgaccaacatggagaaaccccgtctctactaaaaatacaaaattagctggacgtggtggcacatgcctgtaatcccagctactcaggaggctgaggcaggagaatcacttaaaccctggaggcagaggttgcagtgagccaagatcgcaccattgcactccagcctgggcaacaagagtgaaactccgtctcaaaaaaaacaaaaacaaaaacagttttttctctcacaattctgtgggttgactgggttcagctggttgattcttctgctccatgggttgtcagttggggtaactcacttagttgcattcagctggtggctaggatggactggatggcctaagaaggcctcgctaacatacaaggtagcttggtgctctcccatttgtcctctccagttggctattttggactttctcacagaatggtgattctgggtggttggacttcttgcctgctggcttccaagaggaaggaagcagaatcttctagcccttttaaggcctaagcttgaatgtcccagaatgacacatctgctataacaaagcaaacaatcaagtcagtctggattcaagagcagagactagcctccagggcaaacagcatccaccttttgatgggtgaaatggcaggcacagagagagagagaaggaattgatggcagtcatcattggagactatttatcacttttgcattgtaaatatcttctagttttaacttttcactttttaaaggtgtctttgatgaagcaaacttctttatacatattttatttatttatttatttatttttcgtagagacaaggtttcactatgttgctcaggctgtcaccaactccctgggctcaaggaaacaaaattctttttttttttttttgagacagagtcttgctctgtcgcccaggatggagcgcagtggtgcaatttcagctcactgcaaccttcacctcccaggctcaagcaattcccgtgtctcagttacaggcatgtgccaccatgcccagctaaaggaagcaaaattcttaattttaacatagtcagatttatccatctcttcttttgtagtcaacgctttttgtatctttggttaagaaacctttccttgctctcagttctaaaaggtagacacctttttttctactatgagagtttgaagttttatttttcacatataagtccttacttcatctgaagttgaattgcatttgcgacttgagtagaactctgattttattatttccccctggatctagaatattccttcctttcccagcggtctgacataccacctatgttatatactaaagcttcttaaatgcatgggctgcctgttctgtccgataggtctgtttgtctcattttgcctttccttaattacaatagcttcataataagccccgattccttgaagggcaagtttcctcctcccggtcttcttcttcagcaatatcttggtcctttaaagtttcatataaattttagaattatcttactgtactttaagaaagtccttattcaggttttcactggcataatattgtctctatagcttaatttggggagaattggtaagtttttgatattatcttctagctaactctccatttatgtagattttcaaaattctgttaatactgtttaaaatttttatttgtcaaatttcttttgagatacttgatgttctctgagactattataaatggcattttctctttaattaaattttctagttgtttgctgctactctacagagatgcaatgacttttttattttaatgtcacatccagctaccttgctaaaaatctcccagtatttctaaaattctctttagcagatacatttgggtctttattttctttttttattttttatttttatttttttcagagtcaagttctcaccctgttgcccaggctggagtgcaattgtgtgatcatagctcactatactacagcctcaagctcctgggctcaagcaatccatcccagtctcccaagtagctgggactgcaaacacataccaccacacctggctaattaaaaaaaaaaaaaaatgtttttcttgctatgttgcccaggctggtttcaaactcctggcctcaagtgatcctcctgcctcagcctcccaaagtgctgggattacaggtgtaagccactgtgcctggcttcatttggaggttttttcttttttctttttttttgagacagggtcttgctctgttgcccagactggagtccagtggtatgatcttggctcactgcaacctcagcctcctggactcaagcgatcctcccaactcagcctcccaagtagctgggactacaggcaggcaccaccacacccagctattatttttgtatttttagtagagacggggtttctccatgttgccgaggctgctctcgaactcctgggctcaagcaatctgcccatcttggcctcccaaagtgtagggattacaggcgtgagccactgtgcccagcctcatgtggagttttaatgtaaataattttatctttaaataaataataacagttttatttcgtttattccaaatgttatacatctgtttttttctcctgcctttaaaaaaatccttcttgttcttgtctcttgcccattttttactttcaattcttgtggaaaacaccaggttgagtcagaaatagcagagacttataaatatataagaccttttattttgtgtatgaccatgaagcagtaaagttggtataagcgtctgttggaagatatggctacagaaaaaataaagtggcctgtcccagtgatactcatgggaaggaaagagcctcctcaatgatcttccatctgagaagtcccatggattcttttctcttctgctccacaagtttgattgtcttttctttctttctttctttttttctggtgaattagccagccagactcagtttagatgatcccaattttgttggcaacatccaaagcattgtaatcaggagccagttgaacatatgccttcttctctccatcaggcctaatcagggtgttgactttggccacatcaatgtcatagagcttcttcacagcctgtttgatttggtgtttgttggctttaacatccacaacgaacacaagtgtgttgctgtcttctatcttcttcatggcggactcagtggtcagcagaaacttgatgatagcatagtggtcaagcttgttctcctgggggcgctctgccgaggatatttgggctgcctctggagtcgccgtgtcgtgggccgccggaaggtgggtgacgtgcagatctttttttgtgtggctgtggacacctttaaacactgccttcttggccttcaaaaccttcgttttggcttcagctttaggagggacaggagcttccttcttcgccttcggcgccatcttgtgaaaagaccgcaagtttgattttcaaaagtattgtcaggtattgcccttttaaaaagccccacgaggttatcttctctcaaaaccttgttgcttggtgccaaggctttacttgcaggattagtcataaccttggcctccctgagaaagttcttcaaccgcaagtctacttatctaggtagcatgtccacgtcgacttaattctccatgaagagctcaagaaaaatgattaagaaggctgcaaagagttttaacacttaagaaagtcattcttctgattttttttttcacttctagatccacagtctgatttcctttagggcactactaaattctttttgattcttcatataggttgatttgcagtaaatatgacattgagatgtaaggtaaaaattactgaaagttcaggagtaaaacaaatgaaagaaaggacaaggaatactttaataaaacgatttgaataaaaaattttcaccctgaccgtttaagagtaacttaaagaagccaaactttctaattattaatttttaaatacattattaaatttttagaataaatttttctttctttttaaagtcaatgtttacactgatctttttatttttcaaacagaaagtgtatgttacacttttgcttgttaatgtttaacttaagcttgtggactctttgttagaaattattttatatggcaaaaaatttatcacctaaacttggctaatacaaagttaatccagaaaaaccatcatctagggcattactggtttgacaagttgtttttgtagattctttgctgtctgtcaaggttttttccaatagtccttagaaataaacagaaagtttgactcatttttattacctgggcaaagctcgctccttggaattcacctttaacttatgtatctattatatcagtcagacttccaaatgtcagtgttgacacctgtgatgctgtcttgcctatacacttattttttaaatatgtgctttcaaattatttattgctcagacttgaaatatatatttgatatatatagtttttagtgcctactaattgtgagatcaagggctaacgtgagtgctaaagctcctgagcctgtgttcttacctagtctgctgaatgacatggacaggagctgcagagggactgctatatcagcagaaaggctaagatgattctaaatgaaagagaccttcaggctactgtgaaggctaccatttaaaacaaattacaggaaataacgtatgttagtgattatgcatggatgtataataaaccagagttgtagctgttagagagttacagggtagtgttaacttgttatccctggactctggacttaggtcctgattctaccattgaccagtggtgtggttcttgggaaaattacttaacattccactctctttcctcatctgtaaaatagaggtgataataataatcttagtatgaaaatataaactgggtggtgcccagtgcataataggtgctctacaaatcttcatcttaattattattattactttgaaattgagaatcactctaacaacctagaaagcaccttctgcattcctcacatcaataatgtggagatggagataaatgtaaatcataagcattcccattttggggagagattttgcttctagccagatgtaaatcttctaaactttgaggaataataattaaattccctcatcaaataactaaatgttctggtaaaatgttctctagggagaaataaagatcatagaagggaaaatactgatagtaagtgtttagatgtcctagcttaaaagttattcatagctgggtgcggtggctaatgcctgtaatcccagcactttgggaggccgaggcaggcggatcacctgaggtcaggagttcaagaccagactgaccaacatggagaaaccccgtctctaataaaagtacaaaattagccgggcgtggtggtgcatgcctgtaatcccagctactcgggaggctgaggcaggagaatcgcttgaacctgggggcggaggttgcggtgagctgagatcatgccattgcactccagcctgggcaacaagagtaaaactccgtctcaaaaaaaaaaaaaaaaaagttattcattaagcaccatattatgacaatgcattttatagaaagaatcaacatttttgagaaatggctgatggaattattccttggttgagtttctagggggtgcaaggcagtgtgttgggttgaagtgatagagggaagagcaggaaacatatggcctccgacctcaggaagtggcggggccacatacacccaaggcactgcttctgagttatagaaccatttttgtataatgtcgaaagataaagatctacacagatacctcaccatgcatgaaagaaccatgagttgcatactagatgaaaacatgtggtcacacctttggttacataccaggatcaaatttctctctgaacacttaagaattaacttctaagatgctggctaggggcagagctacctctttgtcacagcacattccttgggaggctgtgggtataagtttgcctctttgtccccctcctatgtgatggttataccctaagagcatttagtttgggagcagatagttcagtatgtgaagtccatccctgggaagcatgatcctctgacccacttaaaatacattcgacatagaagaaaggcctatgttcaggttttagatagtaaatggctgcaaaactatgcaaaaaccaaaccaaaacaaaaaccagaatcaaaagaatctgcctagtaagaaagagtaattcaataagaagttagagattataataccaaacagattatcaccacaggtaaaaatggatccccatttacttactgaattaatactgacttctcagtgctggtattcacagccagccacatctctccatgtacctggcaagccttgtctctcaatgcttgccctcaaaggtgaaacaagaccagccggcccctgtgcccttgctcgtgctggttcctctacctggaatgctttccctgtttgtgctcactgccacttaccaaagtcctatccgtcctcccaggcactggacatgccttctctttcaccatggaatatctaccgccattggccacagccatctactccatggaggcacttgctgtacaccccttccctgatggttgtttggatccttgatgcaccactgggactgtggggagggatcttttttgtaccccagtgccgcacacagaattgcacagaggatgacttaatgagtgaagtggatttgttgaagtgaaaacctcttttcatcccaaatacaacaggctcttcttgaagtgttgtatgaaacaaaaacatagctgtaaagatggaagataaatagaccccatatcctaaaaacaccataatcagaggcataaatcggtgataaggtttaagataaatgaaaaagagaaagccttactactgtttcagaatacattccagtgaattttaacagctgacttctctaagctgtataagatagtctttgtttggttccctgtatttgctatatggataagaaaaaattacttgaaagtaaaaaaataaaaaacaaaaaacaaaaaaaacccactttttttttttcagggccagttctgtgactattgcaattctgaagaccccaggaaagcacatcctgtcaccaatgccatcgatggatctgaacgttggtggcaaagccctcccctgtcctcaggcacacagtacaacagagtcaacctcaccttggatctggggcaggtgagctacacttttaactggaatgggaacatgagcttagatcactgtttctatggggatttctgatataataattattgtaaaaaaaaaacaaacttcagttttaatcccctcatcattgttaaacctgttacattaacatttgcttcccttaaacccagaataggccaggcacagtggctcatgcctgtaatcccagcactttgggacgccgaggtgggtggatcacttgaagtcaggagtttgagaccagcctgatcaacatggtgaaaccccatctctactacaaatacaaaaattagccgggtgtggtggcggatgcgtgtaatcccagctacttgggaggctgaggcaggagaattgcttgaacctgggaggtggaggttgcagtgagccaagatcgcgccactgcactccagcctgggcaacagagagagactccatctcaaaacgaaaacaaaaacaaagcccggaacagtgcctggcagcatgcagatagatgcccatccctgtctattaaatgagattaaaaaataattgtaaatagtttcattggcaaagatatttttattattatttttaattgtggtaaaagagacacaacataaaatttgtcatcctaaccatttttaagtatatggttcagtggcattatgtacattggcatcattgtgcaaccatcgccgtcatccatctctagaacccttttcatcttgcaaaactgaaactctgttcccattaaacagcaactccccattcccctttctcctgccgctcgcagccaacattctacttctcttactgtgaattgacaactctaggaagctcatataagtggaatcatatagtatttgtctttttgtgactggcttctttaacttggcatgattttttaaggtcttgaaaacatcagggaaagtgaaagaagctggaaataaaagactatcttatatgattccatttatatggaatgtcctgataggcaaatctatagagagaaaagtagcttagtggttgtctagggctaggggttttggaggaaattggggcgtgactaataataggtatgtttttggagagagggtgatgaaaatgttctaaaattgatgatgatgatggttggacaactctgtgaatatgccgaagaccattggcatgtacactttagatgggtgaacagtatggtatgtgaattgtatctcaataaaactgttaaaaaaaaaaggattcatggaaagagagtgtttcaagaaaaaaaaaaaggagggagaaaataactgtgtcaaatgccattgataagccaaatagcaaaacactgataactgagcagcaaatgaccattggatttgccagtgtggagatcactggtgactttgataagagagcattgaaaagttaactgtagggaaattaagagagaatgtgagaggaattgaagtacctaatacagaaatcaattttaagagttctgctcaatggggcaaaaagaaatggaggagaatcattgaaaagccaggtaaagagatttctttgtttatgatagagatagcaacatgcttgtgtgcttgtgtgcagatggtaacgtaaacagcaggaagaagactgtagctattattagaacattttcataactgagtttgttatgttgatactaatactaaaactaatgctaatactaatattaatgtttatactattctttttgctgggaacagttaagcatagagtacagttcatataaaaaatactacttgaaagaaagaaaaaggtaaatgcatcccatagcatagaaatggaatgatactgagatttcttagaatgaatgtgttcttttcatttcgattgggcagttttgtgacagaagggctttcaacctctttagtccatgtgttgtgctaaattagacctctcctgagaatattttcaccattaatttgtgtctgcaggaattcacagagagccttcatggttcaaaagactctaataagcctcctttcaactataagttagtcttatccctctgatacctaaccactagcattcattcagtagcttctgacaatactaaccaagaattacctaccatatcgatttttttttttttagacagggtctcactctattgctcaggctgaagtgcagtggtgcaatctcggcttactgcaacctctgcctcccacgctcaagtgattctggtgcgtcagcctcccaagtagctgggactacaggcatgtgccaccatgcctggctaactttttgtattttaagtagagacagggtttcaccatgttgcccaggctggtcttgaattactgagctcaggcaatccgcccacctaggcctcccaaagtactaagattacaggcgtaagccaccgtgactggcctatatcgcttatttaactgagggtttttataggtaacagggaattttaatccttcaaaatgacccatactgaacttacccatgtctgctggcttgttcttttttctttagaactttttttttaaacctactttaaaagcctccttttgatgtactgaaaaattccctaattaagacaattaagaaaacatcaacataggaacagttcagtactttgctggttgctgacaaacgtgagtcatggcatgcatatgcataaggcctgtgtccacccacccgctctgctctgcgaggctgctgagaatgtgggttctggagtcagcctggccagtttgtcctgattgctctgctcacttgctgtgtggccttaacaaatatatttttctgctccctgcctcagtttcctcatttataaaatgagataattgtgcatccctcataagattattatgagttctaaatgagttaattgcttcatttaaaacttctttagagcagtcgtattttttatttaataaaataaagtgaactttaataaactctcattaaaaagaacagactgatcacatttgtgcctctagaaaacactacctataatactgtagaaaatattctaagaaagtctaggagcaggaaaagcatgatcagttatgtcagactgaagacatttctttcctcttctgtgttggagcatgacatgttttaacaagcatgttgtgtcttgtaagattcctattttttgccccattggtaagatctgtgttttcttccttttgctggaattaaccatgagaatgtcactgagaggttagatttcataattaatagtaacattaagaccttagagggagagaagtgggaattttgaggcatggttgagaaataaaatgcagatcataaatttgttactacaaaatcacttcacctgctaagaactgaaatttgattttgatgtgctgttgtcaatttgacagcttatgctgttgtgagggtcttgttttcttttagactagttggtgtttttcattgttatttttttggccaataagtttgacaaataaaaacattaccttctggacttgatcttttttttttttttttttttttttttttgagacagagtctcactctgtcacccaagctggagtgcagtggcgtgatatcagctcactgcaacctccgtctcccaggttcaagtgattgccttacctcagcctcccaaatagctgggattacaggtgcccaccaccatgcctggctaaattttttttttttttttttttttttttttttagtagagacagggtttcaccatgttggccaggctggtctcgaactcctgaccttgtgatccacccatctcggcctcccaaagtgctgggattacaggcatgagtcaccgtgcctggtccacagacttgatcttaaaggacagtttccccttaaaacgtggtaaatgtaggacagttctgtgattcactagaggcatcatactttccggggttgttcaagttcatttaattatacattatgcagtagtttcaggctatagaatgagaacacgatgtctttcaggaagcttttgtatcatctggccagatataatgagttcatttttacatttaaagcatgtagatgtccagtttttaaaaggagaatctttggaatctaggaagctttgttctgcctggattcctggtagggcatgggctttggagatctctcccgtgagatcggaaggtgtagtggtgggatctacatatacactctggacttcctccagaatccaaactccagagttctattctatgggctccctatgttcaccttccagctccctccccagggtgaggtatagagaaaaacatgaggaggtgggtgcggagggagttcctatggtccatgacttcagcccccgcagagcaagcctgactcattgtgttccagggaacaacaacaaaattatctgaagaattttgaggcttgtatgcaatgtgtaatgtttccaagagtattattttgttatttaaacctgttagtagtaaaaataaacaaagacaatccctcacccccaacatcaagccctgaaaaggactgagtgttggcttcagaggatggaggtgtgaggagagaaggtgacgttgcccctgctctgcagggctgcgggggagtgaggcctggagacagcagatgtggctgcaggagcagagctgctgagatggtcctttgggcctcgtagaggcaaaggctgtgatgtccacagctccctggtccccctctgagtggcagctgggatggatagttcccacacctgttcccttgtcccatctcaagggcctgcatctgactttgcttcctgcctgaaggctctttctagatttacagaggcttctaaaagctgtgtctagagcagcctgcaagcccagcacttaatgccccaaggggcaatcctcatcccaagagggatgatagttggtgggaaaataccgcatttccctgcctctcaatgggccagttctaaagtgccttctacataattcctcagagtgtccctggtaggatggagccgtggttgggttgctctggtggcagcctactcattaacacattgatttttggcttttctccctcccttatgttcctctcttcccagtttgtgcttcttgaggtcaactcttaaataaactacctctactcaagtctttgcctcagggctttagagagggcccaaactaagacagaagaaagagagtccagatggacatagtggttcatacctgcagccccaaccactcaggaggcagaggcacgaggatcacttgagcacaggagttaaatccagcctgggcaactcagtgagaccccatctctaaataaataaataaacaaataaggaaaggaagcctagattgagaccctgaaaccccctgcaggtgttaacacaggcaaatactatgaaaatgttatttaaaatgcaaaaaatagaaaattcagaaattgtttctaaagctccaaggttaaatgtaataggggaaactgcattataaattttaaggaaaaatattaataggtcacaggagaaatgccccattactctacctttctaatttttcatgaattcatcacagacagtgaactccccaggagccagatgcaaatacaggatccaatcatctgagagtgaattcagtatgtagttgcattctagaatctttttttttttttttttcctgattcccttcaacttttatgagactttggtgggtgaatccaaaacattctttgtagctgactcagatgtggagggaagcctgggctagtttctgatacttttggggcttgaggactttggagattaacttggctctacagatggttggctgatgaggtcactaaggagggtgactcagctggttccccgggtggacacagcccaatccagaaggtggatggctcttggttttgacccagtctttctggattcctgaggaattgtgtagactataagcttcaggaggccagggactatgtcttgttttgttcactgtgttctgttcactacatgatgttttgcttccaacatcttgcacagtgtttagcatacaatagttgtttaataaatatttgctgagttaatgtagaatgaaccaaggatgactcagcatcagcctgaactttcccagggtatagtagtaatggaaacatattgctgtgagaccaaatctctgggtgagggtggaagagttttagctctgtaattaattacggttcgttccatttatgacacttgagtctctctgcaacattttaagagtattttatagctataacaaaattagaaaatacagaagattatatttagaacaattttgctattaataaatggtgtttttttgtttttgtttttgttttttttgagatggagtctcactctgtcaccaggctggagtgcagtggcgcaatctcggctgactgcaacctctgcctcccaggttcaagtgattctcctgcctcagcctcccgagtagctgggactacaggcacggaccaccacacccagctaatttttttgtatttttagtgtgatggggtttcaccatgttgatcaggatgatcttgatttcttgacctcgtgatccacccacctcagcctcccaaagtgctgggtttacaggcatgagccaataaatgtgttattaatgaacatcatcatgaggcacagcccttgaagtcaaacaattcattagtgggtagaaaaacaggtgccaataaaatcctctgggctactagggatagaatattatcctttatggtcctttagtaacttcaaagtgttaatttggggtgctttgaagtaatttatacattaggaagaatctggaaatcaggtgttttcttttaatacatgaaaaactcattctgggtgcagtgtctcatgtctataatctcagcactttgggaggccaaggtgggaggattgcttgaggccaggagttcaagatcagcctgggcaacactgtgaaagcccctctctataaaaaaataaaataattagccaggcatggtggcacacacttgtagtcctagcaactcaggaggctaaggtgggaggactgcttgagcccaggagttggaggctgtagtgagctatgatagcaccagtgaactccagcctgggtgacagagtaagaccctgcctctattaaaaaaaaaagtctctctctctttctctgtatatatgtatatatacacacattcaattggttctgtttctctggagaacgctgattaatactgtggctaaatacaatgaaggtatatttctcatcatgtccaaacacagctgatcctggttaagcagttcccctccaaacagtggttcaaagacgtaaactccttccataattgggtctgccattttcaacacatgggttcccaatgttgccccgtgggtcatctttattctaaccagcccgaatgaggaaagagcatggaagattctgtgtgggaggtttgtgtgggcaagactagaagtggcacatcagctcagtagcttcatattggccatggtgggagcatttacactatggaaatcagcaaatgttacaaatcagggctgctcctttccaagagccagtttacccaatatctctctcggtctcttccatatccctccacttccctctccctccccacttaccatttagtaaactcattatgtcttgtgccgtattatctctggagtctggctcctcctcccccttgatactgcactattgtagtggaacccatggcagctctccccatgattagtccaccagtcttctaactgatttcccagcatctactctcagcttaccctgttttagaatcagcctgaaaggaacagaatccatagtggtgagctgagaaagattagaaacaatcaggttggcagtcttccaagggtctacctatcaatcaatcttctcattactaccagcgcaaaacaaagatctcagtgtgttgttctccctgattagtatcctttagtggttttctattacttttggaataaggtccaagtttcttaacatgtcacatacgctccttcagtctagcccttagactttttgccagcctcatcttaaaaggcactttctcctgcaagacctatgctatgtcagtagagacctaactgtaattccctggatattccatgatgttccctggttctgggccttattttggtgctattcacagttcttggaattccttcccaccttgcctggtctggctatcttctttctgagataactcaaatattgcctgctggaaacccttcctggctgcctgcttccctctgagctgtttctgtttactcagaggcacttgctaagctgtgccgtaaaggctgatccaccgtgtgctccttaagctcagcagctgtgtgaacatattctttttgtatccatggggcttaaaagtcccagaatatactgtgtcctccactaagatggaattaaatggaaatgtgaattccaatactgttgttttcttattattccactgaattatatgtcttgctatcatcatggacagctctgctctattttaagctaacatttacatttgttggttttcataaaactagcaccacaaatataacagacataacagaaaatgaattaaatatgtttccttccaaaacactcagtaggctgtaggcagtcaacataaatccaagaaataggaagaaagataaaaactgtactagggaacagcaacactaggaaacaaaacactttcttctggaatgttctctcagtctatacagatagaagttaagatgataaaatgataaacggaggtcactgtgacctccttggtgagtcttacgatgcaactttgggtcaacacacaattatgaccagcatttggccacttcccaggattaaggccattgtaaagtcgtcagagggatctttctcatcatgaagggtgaaaaccagagtttggcatcacatgggaaagggcagtctgtgggctggggagaggaaccagagctttacatttacatatcatctatgatatggaattttattattattacctagagaagttgtcattgatcctctcactctccctgttaatgagcttaggctgccttatgtcttctggggagtgaagtatctataaacacattcacacgaaagttctgggaactcagtactgatgttacttcccagaatatttgcattaaaaaaatttctatctttgacatgaaactactactctgaatttatccaaaggaattcatgagataaatgctctaatgtctgatgcaagatactcaccaaagcattataaaaatagcatccagtgggaaacaatctcatgtccaataaaaggggactgactcagttagtggattaataggcaccacatgatgccatagaatggtctttatcgacacaacatgtgtctgtgctatatggtgaagaaacagaccaaaactatatgtaaactagctagactgtatggaatgatcacatttagtaggaaaaaaaaaatgtgcctatataagcaaagaacaaagtctggaaagagatacttgaacatgctaagagtgcttctcggtggatggggagatcagtgatttttactttcttctgtaaatctcacagtgtatgtcagcttgctggctctgggtttttacctaggtaaacatctcactccacagcttcctggctgtgtgtaattggatggtctaacgaatgtctcggggtcagtatcttcatctgaaatccagggataaatctagtaccaacctaggagggttcttgtgagaaattaatcagataatacagaaaaagctctcagaatagtgccttacatgctgtaagaactaaatccatgttacctatactatctgtattttttttaaaatttttatttctataggtttttggggaacaggtggtgtttggttacattagtaagttctttaggggtgatctgtcagattttggtgcacccgtcacccaagcagtatacactgcacccaatttgtagacttttatccttcatccccctcccaccctttaacccaagtccccaaagtccattgagtaattcttatgcctttgcatcctcatagcttagctctcacatatgaacgagaacatacgatatttggttttccattcctaagttacttcacttagaataatagtctccaatcccatccaggttgctacgaatgctattaattcattcctttttatggctgagtaatagtcaatggtatgtacgtatacatctttattttctacaatgagcatgtattacttttagaattagaaaatcaataaagccattttctctttggagaaaataaaagggttctatagaaagaggataaaaggaacaatgatttctggtagaatctgagttatcaatgaaaaagcttccttggagttttcctgatgtcctctgtctccccagtatgaactatttcctgatgccctccatgccctatctcaccccctgccaccccgtccccctgatatgagcttctgactgttttgtctcagaatgaggctggtttgctagagatctttcaatgccaacagaatcagaaaaatactcagtaaatggaaattgattttttaaaaaagagcatatttcattccttagctaatcttgaaaactattttatatgcttcttcccttgtggaacttttgcaatttcaagcacacttgggctttaaatcatggccattttcctattactattaatggcaagcatatataaggaaaaactgaatttcatgaattcttcatgacagttcacggaagcttgagttaaatgtggcgtctcaggggagtcactgtgcctggcacctcttctctgcctgctgtcctcagggcacctgcccagcccccacagagcccttgctccttctcatatctgtgaccctgcagccttcctgcaccaccaaatggtcttccttcactctttccttcctgatgcttcttttttctctattcctgtttctgtgattcccctctctctctttttcactttttactcccatcgcatttccttactttaggaaaaaacaagaaccaaaccaaaccaccttttctaagtataacagtataactcaccattctttttttttttttgagacagagtcttgctttgtcacccaggctagagtgcagtggcacgatctcggttcactgcagcctccgcctcccaggttccagtgattctcctgccaaagcctcctgagtagctaggattataggtatgggccaccacgcccagctaatcttttgtatttttagtagagacggggttccaccgtgttggtcaggctggtcttgaactcctgacctcaggcaatccacctgcctcggcttcccaaagtgttgggattacaggcatgagccaccgcgcccggcctaacccaccattcttttctggtggtcactgccagccttgaggagggtgccatgctgtgtccttggcagagtggtggcctgctgagtcactgggggtgtgtgtgcagagaggggagtggaggtgggtggggagtgagctaaggaggtctggggctccccataaggggggctccagcaagaccaagctctttgcctgtctagtacagttgtactgggtccccaggcggcctcagggcacagacaatgtgaccatcctgcctccccaggacttgcgcagctcactctagaccagaggggccaggttttgtctcctccacctggcagcttctgctgctcttcctcacaaggttccctttggtcttgtagcctccagataagggtgctttatgtgcctgtgtctctctcatttgagagcaaacttctgagctgttgcacttctctctttaattcttaaaccacaaatgcaaacattctatggcttaggaattccagattcagcgcaccatgcatgacatactctgttccataggttttaagcactttgagtgataaaattgtatgtttacctttatcactcctcagcatcacagagtaaccagcataaccagcatggaacattcagttctttcccctcccttcacagtcatccttgctgggcagactctcaccatcccttgagccacctcctacaccaagtatcctgggagctcccaaagagatggggagggtgagtggggcaaggaagcccagagccgggaaatgcagcacccctcccctctttggaatcagtttaaattgccatccaggtgggcccaggcagctgaaatccaggtggtgtctccagcacagggtcccaggtgggcagagcagctggcacagctctcatgagggcaagagcgcccagccagagcctggcccaggtgagataaagcacatgagagcagagtccagcctccttgctgtggagtgaggcgagggcaggaagactgtgtggacggctgttttgtaaatccctgtgttcatggggaaggcattgcacccgcactgccaggattgggtgtcttttggctcaggcgctgggcagggctgggcctgaaggtgcctggtatttagagcaggtgggcctgacacctggcttgggctgcccctacttgcttctgagggcaggtggctatagtgttcacacaagcccctgtttatttatttttatttattttttatttttttgagacaggattttgctctgttgcccagctggagtgcagtgacatgatctcggctcactacaacctctgcctctcaggttcaagcgattcccgtgtctcagcctctccagtagcggggattacaggtgtccgccactgcgcctggctaatttttgtatttttagtacagacggggtttcaccatgttggcaaggctggtcttgagctcccggcctcaagtgatctgcctgcctcggcctctgaaagtgctaggattgtaggagtgagctaccgtgcccggcccattgcccactttttaataaggctatttatttgttgttgttgaatttagttccttgtagattctggatattagtcccgtcagatgcagagtttgcagatattttctcccattctgcaggttattcactctgttgattatttattttgctgtgcagaaactttttagtttaattaggtcccatttatatattattgtttttgttgcttgtgcttatgaggtcttagtcatgaattctttgcctaggccaaagtccagaaaagttggaaataaaacctaaagacatacaaaatataagcctcatttaaaaatcagatttaacagatatcagcttactcttttaaattgttttaaggctttctaaatgctgactctcaatttctgtccttgtttgattgattgattgattgattgattgattgatttttgagatggagtctcactctgtctcccaggctggagggcggtggcatgatctcggctcactgcaacctctgcttcctgggttcaagccattttcctgcctcagcctccccagtagctgggactacaggcacatgccaccacacctggctaatttttgtatttttactacagatggggttttgccatgttggccaggctggtctccaacttctgacctcaggtgatctgcctgcctcggcctcccaaggtgctggattatgggcatgagccacctcccctggccccttgttttattgtgaatgagtaacaaacagttcctggaccagcactggtccatggaccacactttgagtagtgctgctctaggccatgtattgtaacttttcttttctttctgttttattttgagataggaccttgctctgtcgcccaggctggaatgtagtggcgtgatcatagctcactggagcttcgaactccagagctcaagtgatcctcctgcttcaaccaccccagtagctaggagcacaggcacgtgccaccacaccccactattgattttattttatttttgtagagatagggtctcactatgttgttcaggctggtcttggactcctggcttcaagtgatcctcctgcctcggcctcccaaagtgctggcactacagctgtgagccactggtgcctggcctactgaaccttttcttcagagcttcagagctattcagatacatcctgaaaaggcctcctcttctctgctacctcaagtctctcctctggctcagatttggtgatgtagttcaagatacatttgttcattatttgaaactttaaacagcccaagccctcttgtgacccagatagtctccctcctatctgtccacttacgcctgttctgtgcccagtgacccaggctggtgaccttcctggacagcagcaacaggctggggggaggtatcccaggtgctcagggggtaggagggcaaggacaatggggcatttggtcccccagctgcctctgttggcccataggctgcagtatcccagctgtttcatcctaaggaggatcttggctcctggcaggcaactcactgtaaggctccagctctgtctgggatccagcatctgttccctctccttccccttcagcccagggtaggagaggtcctcagatcttcttagctctgagatgcttccccattaccagaaggcttccctcctgctgccactgcctttgtcaatgctgtaggtgctttattaagctctcctcaatcacttccttctagtaggaaggaagtgtctatccctgggactatgagtgacacgcagccttctgacttgcttttctactggctgaaatttgccaaagctctccagttgtcatcttttaaagaatgaagggaaacggctggtgcagtggctcactcctgtaatcccagcactttgggaggccgaggcaggcgggtcacctgaagtcaggagttcgagaccagcctggccaacatggtgaaactctgtctctactaaaaatacaaaaattagctaggtgtggtggtgcgcacctatagtctcagctactcagaaggctgagacggggtaatcgcttgaacccgggaggcagaggttgcagtgagcggagatcgtaccgctgtactccagcctgggcaacagagcaagactccgtctcaaaaaaaaaaaaaaaaaaaagaatgaaggaaagtattgaggggtgaccatactgaagtttttaaaaagtgcatatgatgtattgtgtgtgtatgtgtgtgtgtgtgtgtgtgtgtgtgtgtgtttgtgtgtgtagagagagagagagacagagagatctcaactgaattatgactggagtacagaataatattctgtccctttctgtatccccaccacctaggagaatgtctggtatgtagaaataatccagcaaatgtatacttcgtgtatgaatgaatgaagatacagagacttccttacttatgtctgccctattctcatatgtccctcatatacataccaaagccatacatatgcaacagatagtaaaaatatttgtcttttataacttggaacacactgaagacataatgaaaaggttggatctttggtcatttagagtattaattgtattaatttaaatatttcaaaaatagatggtagggagaaagtatgttgctcttttgtggtagataatcttgtaagtcttcgaaaactcttcaacatctgcttcaaaaggtaatcatttagaatttaaaaatgattatatatatatatggcagatataacataaatttactgttaacataattcacatgctagaaattgacctaagcactttaccattattaactcatttaatcctcactgcaagcttatgaggtgggtccccacgttctagaaggggaaatgggaagcccagagatgtttcatagcctcacagggttgtatgggatagacccgggatttgctcccccaagtctggcaccagagccagccttaggcgctgtgtgatggcaatgtacgtgacgctcccgtcctgtctgtgctgggcttagctggaatgctcatggcccgtgtgggtgtttggtcataattgctgtccctctcgcaggatgctgtcatgatgttgttcatcactgcccactgtgttcccctgcaaagatccatttggacaatccctttagtcccggaatagttgtgcttctttaggacattaaaaaacgaaataaaacaaaaatgtatggaccctgggattaagtttccctctttttgctggctactagaagcataggggcaaatgtatggctccaccatgcaggtggacacagcttcatggcctgcattattttgtgtgcaaacctcattacaggttccaacatttcatccctatctgtaattttgcttttactccttttttttgtttttgatttttggtgatttcacattgccattttctttccatccttatacactgccctcaatctcctccccagtctttttttctttttctttcttttttttttttttttttgagacggagtctcgctctgttatccaggctggagtgcaatgtgcaatcttggctcactgcaacctctgcctcccgggctcaagcgattctcctgattcagcctcctgagtagccgggattacaggcacccaccatcacgcccagctaatttttgtatttttgtagagatggagtttcaccatgttggccaggctggtcttgaactcctaacctcaggtgatccgcctgcctcggcctcccaaagtgctgggattacaggcatgaaccaccgtgcccaggcttcactctttttttcttaaacaaaatgggatgtagatgaatacaagcaatatattgatgaaacagtgaaatataattgctgttttcatttcagtgatacattttttcttacttagaatacgctgtccgggcatattttacctttatgattattctaagcctgaaaaatttgtatattcatacagaagtatttcttgttttacattgttaaatatttctgagtcatgttgagaagtatagtgcaattctgcggaagactctgaaactttatgagcttaccaaggcttatttcttgggttttttctaagtggattgttacagagaagctcaacagcaagcagaatgactgaacatcaaaggctgtctgaagacggtgccaggttataattttccttttacaacccctaatggacaaagaacctgcttttactcagctgttgccttttaaaattgatttggttgttttccccttgagcaaatatatcctttaattataagacctcatgagctattgtactacttcattcccagagaattttttcttttgctcttaaatgtttccagtgacagtgggataataatatgtgtgttgctagctaagagtgggattctaaatatacagggattcatcctaagcatctagaacatgacatataatgtcttgaggcattcttttaaaacacccctcccacccacattgtacttcttcctagtcattttttctcttcttgttaagatttattgcttctttggaggacagctggggactaaagtgtgctctacagtgaaattctttgctcaatgtattatcttgtggcagatagacctgcacaaatatactgtactttgtactatctacctgaagacacttactttgccccacaaactggtgtgcagtcatggcatgaagaagacatacacttcacaggcaggaaaacagggccagctttccagggagatggtctggcagctgttggcatggtgtaatttcaggaggtaagagtaggtttcccatgagcctggaattcctttagctgaggataaagcttttaaaaggctcatgtctttaaagatggcaacaacagccactggggactactagaggagggagggaggggaaagggttgggaaactactgggtaccatgctcactacctggatgatgggatctgttgtaccctagacctcagcatcacgcaatatacccatgtaacaaacctacacatgcacttcctggatctaaagtaaaagttgaaattataaaaaataaaataaaaggctaatggctttaggagaggtaagacattgacttcagagtcacatgagatcagctttccttaggagaaagggcagccctggcaatgtgattctgatggaacaagggtgtgtattatgggctgaaccagtgcttcccaaaccttagtgtgcatctggatcatttattaaaatgatgattctgattcacaaggtgtggctgtgccggtagatcctgcatttctaagatgccccttgatgaggtcaaggttgctggtctgtgggccacattctgagcagccaggggctagaagggctcagagggaagagaggagctgaggcaaaggctggggctagtagtaggatgggcagcagggaagaggcgagagctttggtgcagaaagatgagatccaggaggaggaggaggcaaagcctcccaagtgactttgagggtgggaatgaacatggtatgttagggacacacagactcaaagattggggtaaaacttctcacacccagctaactctttccattccttctgtttgatcagtaaacagaaattggctttcttgggtatgttcacatgggtgctgcaaaatcagtctgtgcagcaatccctcgcggaaccacccagggaggaaaggctccttgaagaagggacctgcagggtgcgcaggttttcagcatcaaactccctcgcattggctctatctcaacctgtagctgtttgagataccagggaagctaattgcttaagagcacaggcttcggaatcctacagatgtaggtttacatccttgctttgttacctactcactgggtaactgtaaacatgccatgtgtcttctccaaactgcagcctctgtatctataaattagagataataatagtactgacatactaggggtgttgtaaaggccacaaaacatgtaagcattagtacctggcacaaactaaatcctcaacaagtgctagttctcctctttcttgtccttcttactattaatttaataattctgcttgactaatccttctggcaggtgccactgtttttgacttttacttgctactgcaatcacctgcccacttatcctctcttgacctgcatttcctcaagctgaagaatcccagcagatagagctccaggtttgggactaatcagcagcccagggagccaagcagaggaggcctaggtttctagttcagtgggcagctttggcttctggggtttcacatgcttcttggagagtcaaatgcatgcacaaagattagggtatccctgataagtgtaactaccatggagggaggcattatctttgcttggaatattttaggaagtgtattagtccgttttcatgctgctgataaagacatacctgagaccgggtaatttataaagaaaaagaggtttaatggactcacagttccacatggctagggagacctcacaatcatggcagaaggcgaaaagcatgtcttacatggcagcagagaagagagaatgagaaccaagcaaaaggggttttcccttataaaaccatcaggtcttgtgagacttactaccatgagaacagtacgggagaaactccctccatgattcaattatcttccaccaggtccctgccatacaaagtggaattatgggggctataattcaagatgagatctgggtggtgacatagccaaaccatttcaggaaggtttcgcaaagaaggagcttttccatttgtctttagaagataaatcggagtttattgggcccttttcatagggtgaccagttatcccagtttgcctgagattgaggggttttggagatgcaggatttttagtgctaaaaccaggacagtcccaggcagactggaatggttggtcatctctactagtctgtcatgaccagggctacctgatcatgagtcaaggtcatgagtactgatcatcagtacttcctgctgatctaccgaatttgagctctctgaatttctactgaattagaatttccagaattatagcctgggaatctgcattttaacatgctttctggttgcttctaatgtacactgaagtttcagagtgctgcagtgacattttccctgcatcagggattcactctgtgttctctcagccacggtgatcctccatggccagcgtgggacacgtgagtggagaaaaagtgacgcaacatctctgccgtctcaacttctaccaccactgatttccaacttagccaggacagtggggccaaactggtatgcagtggggtcgcctaaacatcattgtctgtactcctggctcaccaggatttccaggtctcctttcaggctcagggtattctgaatgtcctgtgtctttaacagaaaacgggaccatggggcctgctttggttccccatgcaccacagttccttccctctgcctcagggatcttccggacaatacagcctccatcagtttgtgtccttgggtgagaagagcatggagcagagcccaccttcagtacacatggggcatgggtgagatgcaaacattatttgaagccactgaggttttggcatgcatggtcactgcaaccacagctaacttaccatgatagacacaaactccactctaacggagtgtgcctctaactatcctcagttcctcagttgtaggacaaaaggcagatggacagaactttccaaatagattccctggaatggagcagaaaaaaagcaaagatttccttttagaactccatgaacagaaactgagattctgaccgaactacaataaaaagatagccccacgtggccatccttaggcctttgtgcctgtgcaccaggagtttcaaggagcaaccagtcctgggtttggtttatggaaaggtctttccagcctgagtagaatgccaagaaaagaagaagccagaaatttacagggtcatggagatacaaggcagagctgtgggatctggacggccagcaggagcaggacctggccgtccagatggatattttaaagctcagaaagttttcccaaatttgggatggacttagtccctgggcaattgaattgcaattcaagtggaagctgtcttctttctttaccagtgaggcggttaatatacctatttctcttagctaacaagagtgagttaaagaataatctcaagtactgactgccaaaaccacaagaaggaaagggttcctcgtagactgcatgtgactcccccttgggtacatgtgcccactggcaattgcatttatgaggctctccccgttgtgccatcttctctctaccctgaaccaaaggtggctcctgaggctggcctggaaccaggacaaggggctatcaacatttcaaaagattccctgggatttttgccaagtcatttgaccagaacatgcagcaatatatattttgtgattactagagactgctgttccatttagttttgagtcattctgtctccacaggaagaagttgttagagagttgtagagctatgcgtgtaggcttctaggagtgagctgctcatacgtcttcgttcctagcgtgttgtgagctgtgcctgtctcttgttttatttctgttttcctcctttgtctaagatccccattcctgatcccttctccttcataagcatctgctctgacctctttgctacttatccttaaacacgctcccttgaggtgcgctcactgctgtgggctgagcacctactgtgtgctgtgctctgtgtcaagagtcccgcaggaatgggctcttactcctcacgccaaccttgcgtgttacatgtgcaccaatgtctctttcaatgcagagcgtccccctaggcatgctcctggcctttctctgcttacttttttccagatggtgagtgtggagtctagagctgggcatgcacagctctgcctcatcccttgggagcagcccagtgctcttctctgtttcaccctgagcagagaagagccacatgggctgcccggccacagggtgtatcagcaactacaacctgcatcctctaagacccgcttccccagaaatatggtcttttgccctcatctgccctgctcctctttcttatttgttaattggttcagaaccagataggaatgagggatggtttttattgggccctttcaaaaacttcaacattaagtattattattatttctttatacagacaagtgtagtaaggcacaaggagattgagtgaatctcaaagcttaatttcttaagagatggcacagtttggaagctagcaccagacattctggctccagattctgcactctaaaccattacaatacactgctcataaaatatgaagtgcttttttaatgtatgtatttttagactttgtataaatgtgctatcacatctagtttgacgtcttcaattttcctgtgctttatattatgtgggttcacccatattgctggatatgcatctatttctttgcttttgatgactatagggtggtatttgtatggtcaattagtgagactatctttcacattgatcatattgtcccatttcaacattagattattttatataatattgccttgggggaaatcatatacaggtataaatgaggtgtgtaccgaaagttacatcagatatttcaaacttaaattgcattttttccaataaaactgttacaaattagaattctcccttaagctatgcccaaaaaactcaactagtcccatgtagttataaaagctttaatatttcacatttgcaagatagagtggtagaagccaatactgattttgggggaaaatcctaaatcctctctgtgtagtatttgggttacagggagcacagaaggctcccaggattgggaaaagcttaaggaaggaagacaaagggatgagagattaagggaagggggtggagctgggtccaaggaaggtgtgcaggggaagacctgtcattgtgtggacgctggggatgagggaccttggggtttcccttactccagcccagaggcccctctccagaatgctcagccactaccacctaccctcttaagacccagactgcattcccctagaagtagctggattgtttttagtgggattgtccttgctggcatggaaaatgcttcccccacccccaccactagtcccctcctccagtgggcagagtaggatatgttgcccccaggctcgctgggtgtgcccagagccaagactgctggctccagtttctctgtttaatccacaccttctgaggcagatctgtctggcttacctgtccacctccctggctcctgttgtactccatgtcccttctggggtaggctgccatccctgccctagttcccagcagtgacatcccagagctggatttcaggaaactgaggctcagggacattccaatcaagtcacctggctcccagcctatgctgatggggcggaaacccagttctgttgtgcatcaggcatggaatccacccgcacttcactccccttcccagccaccttccctcaccccattccgtggtgacctttcatagcccccctgccctgcgatgtcactctgacccacacatttgttctgctatgaaagatgcctgctggggtccttggaagagccagaacatttatgtgggggcatttggaactcaagggaagttctgacatcctgatccaagagttcacctgggatgtgccttctcatcacagtgaaagtgactttgagctgtcctgttttacgccaagtaagtggaatccttagggttctggctgactctcagcatcgccctcatccaggcaggttaccggccctgccctggcccacagcagcattggctcagaggattcctgctgcaggtgagaagcgagccagaagactgagtgcgtgttttgtattcacaaggccacgtgcattctagacttgactatttaatcactcttgtgaggagtgttttaaaggagaagtgcagtgctgcacaaagcagagaatgcagacaactacccagagggaccgctcagcggaggcctgagcttaagtaggagttatcaggctccagggggctggggtcaggcttcagtttgggtcacgctgagctggggtggaagtgccgtgcctccaggaaatccggctctgaagtctctgtgagaagtctgggctggaaatttaaatcaatcgtcggtggtataagatggaagtagagtgtggagggaggcaagcctggactgggacctgaactctgagagaactgcaagagcagaggggagtgagtccccgcacagcagttgaagtgtggatgtgtggggagaagagaggtggggtagggctggaagaggatctggatggaaggagaggcgttttctttgggatgggagagacacttgcaagctgatgatgggtgggtccaacagaaggcagggaagtgcaatctagcaagcagagggagggattggcttttgacaggaggaggttcctccctccctccttctggagagaagaaggagcggatgtgcagatgcaaatgtattcgtagacttgggaaagtaaaggaagcggttccttttttgtggttttgattttgctagtgaaagaaaaacagtactcaatgagggtggagggagcataggtgggaagtggtgggagtttgaggagcatggagaatcaggcccagaaaatgagcagaagtgaagaaggctgcatagtcaggaccacagcagcagaaggcacagagcccacctgtgaggacacagctgtgttcgaacactacctgccgtggctagtcctgaccacacgtcagccctgagcctggacaggggactcaggacacccctgctgggatcagccattgtccctggaagtgagatggtgctgccatcacagccacttccagaaagaattcttcagtgtctctgcctttttgcatcacttgctctagatgcagactcttggaaggaatcatgcaattcactgagcccagcgggtgcatccctgctgccttacctgccaggggagctgaaaaagctggtattttcagcttctaaagttggagttgcattctgttcccagcaagattcatacggtggaaaggggattcagatccttggaagtcaaggaaacaaaagacagatacctgcaccatggcttcctctctggccttactctggacagctgcccagtgtcccttgtgctacacccaagcacccagagagtggcctcctaatcctggaactgtgaccttcttagagtgcaggttggtgcctctgcagatgcacagcctcttaccttatttgggcttgtcattgtgacaaccaataaaatatccccttcaattttccagacaccccagaccacggtacgacaactaccaaattaagggatatagtgttcagaaagcaaaggcagcttttgggcaaagggcaagttttaagaagaatatttaatctgtagcccagctgatttgaaatgacactccgacataaagctcactcccaaaataaatattctgactaataaaattaaacatactgagccaatttaagtgagcttcgttatgccctttagaaatgtagtcaaaaacgtttctgaagtgtcctgacatgagtaagggcattggaaaaacagcaaaggataatttcagccttaagtaaaactctgagttagccaaggatgctgaatcttaagaaagatgtaacagaaggagaagggaatagatatgacaattaaaagttggaaagaaccattatgagtgcagaccagaaatgttaacactctttagatagaagcatattggccaagaggaggaaactggagtgttatggagggtatgaacttacttatgaaaaacaacaataacatcatttagaatctaatttaggacaaattatcatcactgagaaatattttgttgaagcctattctggtgtaagccacttataaaaatccatatatttttaggagttgtttggtctaaaaaatataaatagattgaaggaggatttaggtaacttggttgctggttattaaagttgagttagttaaatctctttgttttggaagaacatgactatagaattttctttgttctgtaaagttcgtcagacacattcttaggctactcatcagttcagcaaaaaagtgtgaatgagaaaaagtgagttttacagggagaaccaggtccgagacaaaacaaatccatgacagttgaaagtcattacagagagtaggataaacgacaagactcagttatgaaattgagctcagagctgttgggttccggcagacctcagtttatttatagtcaccaccaaatctatttgtaagttgttagttgtggataaaatgctcttgagtaacagtttggtctcaagttctgcaagtctatttagggagtaatgattaaagaccactaggactgaaaattatgccatatgtcatcaatccttctctttcctcccctagagttcaaagtttatacgtataaaatctatgtgtcatgcctaacaacttcccctttgtcttaccatttttttttttcctgaaatctttcattaagattgtcattttccaagttgttgtggtgacccaaatctttagactgagttttggtgtagggattttatttctcaggctcctgtggttcttttatattagaaagtgagacactctctcttctcctttccagtttccaccctaatctttgcctcctgctgacttgaatctcgatttttttaaaagaacctagggagacagggtgtgggcatttaaattctgggcaggctgccatgtgggatggagagtagacatctgtgctactccacaggggaaagagggctgatgagagaaagtttttgacaaacatggaggaaacctgtaatggccagaacttgtcagcaatgcagtgagttcccctcagaatgagatgctagtgtgggaggggacttagggacctcttgaggcccttcctctaagtttctggagtgatccaccttccctcctctgggtgagcaggtacttctgggaaccagtaagaggagctgagagtcagtactccttagacctaaaccaagcacactttttttttttttttgagacagagtctcactctgtcgcccaggctggagtgcagtggtgcgaccttggttcactgcaagctccacctcccaggttcacgccattctcctgcctcagcctcccgagtagctggggctacaggtgcctgccaccacgcctggctaatttttttttgtattttttttagtagagacggggtttcactgtgttagccaggagagtctcgatctcctgaccttgtgatccacccgccttggcctcccagagccaagcatactctttctgatagtgccagggcctgagtttttcagcacagggtgatgataaacccaaaagaaagaagtgttcttgctgaactattggcagatggactctttgggccaggattaaaaggatcccttttcagactggttgggttgtattttcatccctggccttggttgttctgtgaggattgtacttcattttgtaaaaaaatgtcaaaccaggttaataaactgcagttgaattttaatcgccatcgtttcttctcaattaaaaaaactctataaaattggctcagttgatcagtttttcaaatggacaccaaccacaaagtaaatgtaattgcttggttctatatttagtgacttatttttcataatttgtatttgtattttgtacctgggtagtaggggcatttataatttagttaataaaaataaatgtttcaaagtgtctcccccaggttacttattaattacaaatgtaaaaaaggtaacttacgatggggaaatatgatggacatcttttgaagcaagtgatgaaacttagcattatcaataataggacagcttggcttcacgtgcttcttggtgacatcatgagaaggaagtgccacccacttagtgatctggccaagaatgccccacctgacagcactttgggaggctgaggcgggcggatcacttgaggtcaggagttcgagaccagcctgaccaacgtggagaaaacccatctctactaaaaatacaaaaattagctgggcatggtggtgcacacctgtaatcccagctactagggaggctgaggcacaaggatcacttgaaaccaggaggtggaagttgcagtgagccgagatcgtgccatggcactccagcctgggcgacagagtgaaactctgactcaaaacaaacaaacaagaatgctccatctgagtcaaattatgataaaataagcagacaaattcagactgtgggacgttctgtgattctgtgaccaattctatgatggaacattaagacttagaacagactgtgggacattttggactgttcaaaatgtcagtgtcaggaaggacaaaacatgttgggggactgctgtggattaaaggggacaaaagagacctgacgactcactgccgtatgtaatccttgattaaatcccgagatgggaaaataatacaatggggattattgagaggatcagggaaatttgaatatggacaatgtattaaatacaattttgaatatatggtaaaatttcttagacatgaaaatgttgaatttatatagaagaaatatccataaaatttcttagacatgaaaatgttgaatttatatagaagaaatatccatgttcttggaagataacatgctgaagtatttaggaggaaagtattatgatgtctgtaacttcctttcaaagaatcaaaaatgtgtgtgtgtgtgtgtgtgtgtgtgtgtagagaacaaaaaatatggtatattgttaatagttggtgaatctaggtgaaaagcatgtgagtattcattgtattgttctttgagctgtcctgtaggtttacaaattatgcaaaataaaaagttgggagaagtaaattatgaaatgctaccttgtggaatagtatgtttattaaattataaagctattgacagactgatctcacttttattataaacttagagttttctggcacagggagtactatttagttgagtaggaagcttattttgtatgtgactttaagtgtacttgcacagtattttgcactttcacaatcccgtctgttagtttaatttcaattcaacaacatgtattaagcctcttttctgaggatataggagtgattaagaccaaagatggtgcagcctagtgggaatgacagatgaaaacaggtaccgcagtgcatgacaggtgctcttttagaaggagaatatcaaatttgtatgaagtagatattattcttcattttcttaaatatcttttttgatcattttatgagcaaataaatgaaatctcagagtaggtaagtcatgtacttggagtcacatagccagtgggtgacagggcagagatatcccccccaggggagttgattctactacaacttagcttagacaccagggtaggaccacttcggggttcagctctgtctctgtgtttgccaaatggtacctgccccttgaactcagtagcagctacacagctttactatccatccatccatccatccactcatttattcattcatagcatgtattgaacacctattacatgcagtcagtccaggaaggccctgaaatgaatagaggacaggctgtaccaatctataatttcagaggcttcagagcatgcagcactggggtgagaaacaaggatcagaggacaccctcttgtcttccctactcaccctgaagtcttttgaagttgaagtgcctcacactcccccttttatgatcattatctgctttattaaaacattatttaaaagactactttgtttctctacctaaacaatcaccaacacacttcaagctatctttagcttattacaaaagcacgtggagagattacaactcagtccctctccatcatttctccccttatctctgacccccaaatacgatctctttgaaaatgcacaactttgcctttctacctacagtggctccatagcttggtgctttctagtctcacagagggtcctcgtttatatcagcaaatctctagcagcactcatgtgtgctttgaagtattttcagtggccaaagagtaaacataagtactgagagtaaaaaaggaatgtagcagaaggagtgattcaacaagcatataatttaaaattaccaaccaaaacagaataaatccctacctgttggcttaacatgcctgaacctggctgtgaacataattatgagaccactcactctgcctcactatgacattttgaatctgcaagtgtcagaggagatttgctgcagagctggagaccttggcaagattccagggcatgttacacagcaggggtggtgataaataacacatatagtcgcttggtgcaaatgggatccaaaccaaagagatacaccctaccaatattcagagcacataaacatacattggggaacctcagaaataattcctgagacaaaaatgggagggaaacattgaaaagtggcatgttctagctaattagtgctggaagatgagttggtgccatcagtggacttattaagttaggcctgggtggcaggatactgtaacaggcagaggggcacatcaattgctgctagagttgggatttttaagtgtcataatgcttcaaaagaatctggccgggcacggtggctcatacctgtaatcccagcactttgggaggctgaggcaagtggatcacgaggtcaggagatcgagaccatcctggctaacacggtgaaaccccgtctctactaaaaatacaaaaaaattagccgggcgtggtggcaggtgcctgtggtcccagctactcaggaggctgaggcaggagaatggcgtgaacctgggaggcggagcttgcagtgagccaagatcgcaccactgcactccagcctgggcgacagagcaagactctgtctcaaaaaaaaaaaaaaaaaaaaaaaaaatcaaacgttacctagaaacaagatgaaacttgtggattaaaggggacaaaagagacctgacgactcactgccatatgtaatccttgattaaattccgaaatgggaaaataatacaatggggattattgagaggatcagggaaatttgaatatggacaatgtattaaatacaattttgaatatatggtaaaatttcttacacatgaaaatgttgaatttatgtagaagaaatatccatgttcttggaagataacatgctgaagtatttaggaggaaagtattatgatgtctgtaacttcctttcaaagaatcaaaaatgtgtgtgtgtgtgtgtgtgtgtgtagagaacaaaaaaatatggtatattgttaacagttggtgaatctaggtgaaaagcatatgagtattcattgtattgttctttgagctgtcctgtaggagaggacagagaggctcccttctgagccactgaagctacttctttcatatagctttgtagtagcagaaagtacaactttagaaaaccaatgccctgaattaacacttgagatatatcataacatagctccccacccctgggctctctagaatagaattttagcatattgggaaataatgtttggcacttctctgacaacttcttccccccaagatgaaacacgtcaaatattcagtacctattaggtcctgtgacatagcaaacactcagtgggtggaatacacttaggctgagtgtttttatacctgcaaggtgtgggtttgttacttaacctctctaggccaaactttcctcatctttaaagtggggttaataaaactccgcttcttattatgaggtctaaatgagagaatgtttgtgaagtgcttaacatggtatgtggaaagacagtattcattattcattaaatcatgacctattagataaatagttttttagagggttatgtgtgctatgattgtgggagtttggtggaagggattaagaatgctttgaatgattactgtattcaaaaaagtttcatttgtagtctatcaaactcacataattaacagtggccttattttgatgtggtctgagagagatgtgcaaagagtttttagcgaaatatattagctctgattttccaaacatgaattcttggatttcctatgaattccttcactacataataatgggatgtgtctttggaaattgttacacctacgtttagagtattgctttatgattttcagagtacattataattcctaattagtttttatgaggttggatcactttttccacgtgttggtagacaactcgggagtgttaatctgagcccaaataagcacttttttcaagatcaaagagcaagtgtttgatagggacagaactggctgagcttagggtttccagtaatcagtgtgacaattcttccttcctcagagataagcaaaggggcttctttgagcaaagggtaaatctctgtgcctgagaggagtggttctcaaagtatggatgagaacctgtgagggtccccaagaccttttgggaggtctacaaggccaggggtcctccttcctccattacagatctatgtgaggccagatcttcaaatacttcagccaaacaacatatcacatcagagtgaatgaagaagcaggtgtgggaatccagctttctcctattaagccccaaactcagcgagcttaacaaaaatgtaaagcaatgccactgctctcaccaaaaatttcatgttttagaaaatatagtaatttttaataaaatatatttatgctaacatgtaaaatgtttgttatattaaatgaattaatagtatatctaaaagttttttaactttaatttttaatatggtgcacatcaatagatagaactcatacaaacaaaagtttttttaggtcttcaataatttttaaaaatataaagggggtcctgagaccaaaaagtttgagtctcattgtcctagattttttggcttctgctttggggtttggaatgtttacattagctggcagttctcagacttaaaaaaaaaaaacaacttaccatactactgtttgtgaaaaatattaagatgaaactcattttttttttctgggaaagaaaaggaacccacagggtctgagcactccctactccccaactagaggagcctgtggttcaaagggcattcttgggctagaggcgagtgctcctcagacagtcaccgggaaatctgttgcctgggggtcagggagcctggaagggggtggggataatcctcactcattaacacattaacatagatttgcttaacaccgtgttcaatgtcgtaccaggctctttgggaaataggacctcagggttcaaaattcaagccagataagttttgggggaaggaatgggaataaactgcaaaggctcctgggattcacacatgaggcaccatggagttgaagagtgggaggtgaagaaagaaggaccgaagccccacttcatctcttccatacttttgcatcatcctggccatgggcaaaagagtgatgagggcgaatgagaaagccaataagagggagaacaatcaggaaaagatgaggccggaggagatccacagggaaggagtgctaccactccatcaaatggctgcttgggtttcagttctggcagctgtgatctctccaaaacctggaaccagggttaggacactgctgggaaacactctgggctgttctcctggttcttggccctgggagggtttagcacgtaatgactactgcttgccatcagacttttctgaatgcatagactttaagatacactgtagactggttgcaatggaatggcatattggttaaggtgtgacaaagatgatgatcaatgtgtatatttggtggagaaagaaagataatgatttttgttttgaatttgatcagcttgagaggctgcagctgggtagagatgtccaatagacaggaatcaggatcgggatcttgagcaagggattgtggtgggacgtgttgccttgggaatcagcatcacatagagatggtagaagctgtgaatcgatgagatgacattaataactgtatctcttttgttttatcagctcttccatgtggcctatattttaatcaaatttgcaaattctcctcgccctgatctttgggtcttggaaagatctgtagactttggaagcacctactcaccatggcaatattttgctcgtaagtaatcttgcctaccatgttatgcatggctttaattacttggaacagataaagactatggatttaattagaaaattaatcttggctgggtgtggtggctcacccctataatcccagcattttggaaggccaaggcgggtggattacctgaggtcaggagtttgagaccagcctggccaacatggtgaaaccctgtctctactaaaaatacaaaaattagccaggcacatgcctgttatcccagctactcgggaggctgaggtcggattatcacttgaacccaggaagcagatgttgcagtgagccaagattgtaccactgcactccagcctgggcaacaggatgagactctgtctcaaaaaaaaaaaaaaaagaaaagaaaattaatctctcagtatgactagttagggactggtcacttttaacctctaaattactctcagaacattgactgggcgcggtggcttatgcctgtaatcccagcactttgggaagccaaggcaggcgggtcacttgaggtcaggagtttgagaccagcctggctaacatggtgaaaccctgtctctactaaaaatacaaaaataagcaaagtgtggtggtgtgcacctgtggtcccagctactcgggaggctgaggtgggagaatcacttgaatccaggaggcggaggttgcaatgagccaagactgtgccacagcactccagcctgggtgacagagtgagactccatcttggaaaaaaaaaaaaaaagaatatccccatttttcaagcatgtgttcaataatttcaaggatactacatgcagaaatgaagtagaaactccttttatgataacagttcttggcactatttgggagtacctgtaagatggtagaagctgtgaattgatgagatgactttaataactgtcatctccaatcttttcccctttatgcagaattagaaactaagttccatctttatagttcctgtgctgtgctttacttacctcaactctgttatcttcactaatgaagaatgtcagggtttctgaaccctatgatgaacagaggtggacaagaattttgcttataaaggcattgggttttccactaggtttccttagaagataaacttgcctaagtatgagcgtggagttagcactgcatctccaagcattgccactgaaagtcaactggcctgaaatggcttggtattttctttcatgaattaaaaactccattatcagcctttctctaaaagttttaaatgcctttctgttttttctttctttgtgtattttcttaaggaaacataaggcttcttaagagatttgcaacaaaatgataatattttgttttataatattaaaatattttccttctagattctaaagtagactgtttaaaagaatttgggcgggaggcaaatatggctgtcacccgggatgatgatgtactttgtgttactgaatattcccgtattgtacctttggaaaatggtgaggtaagtagatttggaagactgggagagataagactcagaaatgaccatgaggatatccaatttttcataattgcgaaacttgcactttcaaggacatctaacatagatcaagatggaaacagggcttgggactgaacagtaaaggaatcacattgagggctcccagaatgagccaggttggaaattctgttgggggatttcagttatccccagaaagtcaggattcttgatccaaagcccgcaggtcttgaactgtcctttctggtgatgtatttataaagtgggttgctggtaactgaaatgatgaccccttacctcttcacctatgatcccatgataccccgtaagagtgaggagaggaaggacaggtggcagcaggtagattttctctatactgtctcttccctcatctgatgaccagatgtaggggatccagaggaggactctgaggtcctacagaacggctgcacctctagatagaaagagcctgcttccctgaatgactgcatggagccgatcctacgtgatccctgatcccttttggtagaatgggtgtaatctgttggagagaaaaaattgctgtccctgtggggttgcatttggcccttgtaaagtcaggttggctattgttaagggagatgggcaaacaaaggtgaaacaatcagagaagatttccatggaaattgtgaggccataatgaatatgaactgagtttcaaataaacttccttcaaaggtgtcagcctccctctctttaagtagagagatcttacttgagcatgtgtatgcggtatcttctgacagctcatgagtggttcatatttccaatggttgacacttgggcttcatcactttgggctttaaaacaaaatggagggtttacacagtttttttttttttttttttttttttttttttttttgccccattactgtcaaactttatatctagagatttccttttttcaacctcatgtagatttttgggttactttagctttgtttctttgatgcagcttaagaaagttgtgtccttatatttacaggttttaacattatgttttcaacatttcatagtgttacagtcccacaactaccctgatagaacaaaggctttgaaaacgtaatgataacatctcccgagagcccagatttcaaagacgtattgccagaccttggaaccaggaagtgtgagggaagatgggactagcaatgatgtttttagacataaacaagacccaagaccccctacgaatatcaaatggctcaaagaaaccaagtgccttggggcatgtgagttatttttacttacttgctgctaaattttgataaaaggaactttttccccctttatgtgtgtgtggtcattttaggttgtggtgtccttgataaacggtcgtccaggtgcaaaaaattttactttctctcacaccctgagggagtttaccaaggcaacaaacatccgcttgcgttttcttagaaccaatacgcttcttggacacctcatctccaaagcccagcgagatccaactgtcactcggcgggtgagtagtcagagcatttgttttgttactttatttattcatttttttggcttaccaaattaattgccttgaactcttttaagtaacctttatagcctgtaatgatgtaggtgtgggagttgttcttatctgaaatactagatataattaggagtttatatctaatgacttataaaaatggctgtttgaagaaaaatcattatattcaaagaagatgaaaggcaaatgattatagtcagcctggtactagtctggatgggataattaatactacagccaacaattcccaaatctcagtggcttaacaaaataaagctttgtttcttgctcctattacagtttaacatgggtcagcaggtaggatcggctccacacagtaattcagggaagcaggttctttctatccagaggtgcagccattttgtaggacctcagagtcctcctctggatcccctacctcttggtcctcagatgagggaagagagagtatagagaaaaatctacctgcttctcatcagaggttacttctatgggcaagaactggtcatatcatagcctcacttagatgcaaggaggctgggtgatgtcatctagctgaaatggaggcacataggtattggtgagcactagtaccctctcctgtgttggaggtacaccatgaacatctctcactctcaggtgtcagggcagtacacttgtctcctgggcacagagggagcccacagaataaacacattgagctcactcttcttccaccctctgatctactggtgccttccattggccaaagcaaacaagaagccagagagaaagacagtccattggttgcaaccataaagttcagctcctgggcacaggacagggtggagaacgtggagagcagatctggagggtgaatggaagatgcccagtgcaccttatagagtttggctttttatataggtaacatcagagagctgggaaaggaagggagggaaaagtataagtattgccacagttttgagcattttccagaaaggcaggcaccttgggtgtaggtggcctatcttttgtatttttttgctctcctcagctccctctgagcttctgtgtagttggggactgtgttgaatctgaggatggatatttacaagggagggctggactttctcataaactatagccgggctgtgtttctgttcctccatgtgccctggagcactgccacaaatgtaccctaccaattttttttttcttaaattgtctttttgggggttgcaagatttgcagtcatatatatctatgtatattacttttcacttagatgaatacaggcctctccattaaataattgttttatggagtataccacacacataatacataatcttaaccccccaagtttaggttgcttctttcatggaggaatataataccagctaccttatgacacagatcacgtgtgctgctgggtgaaggctgactgggggcttctcttgctgctgctgcccttaatacgtgtggaggggaacttttacagtggccagcaggaaagcccctgagtgttaacttgtcacagaaagccctggtaatactgactttatctgtattaacaaggggggctgttaatgccttcagactaagatgtttccaggaagcattgatactttaacaggttttaattagggaaccagaacagaaccccaacattaaatcaatagagctctttaaggcagccacactcaacaacaacaacaacaataaagggacaaaaaccctcttgtccttgcgaattcaaagacttcttgctgacagatattcttctcactggcagcatggcctcaatgagaaagattgttctacagtcctcacattcctcccaaatcctgggcagtctcctgccaagtctgagaaggaaggttgctggcagagggagctggcaggaggagctgcctattgtcagcactgcagaggcctccaacatattggagaggggccttgtcaatgagagggtatacacatatttgtggcctggtttaggggccaatcctcagctggatctgagctggctctgtctggcctttctggagcttgaaactttgactctagcctttttgaccctgtgctaggaagtcttcagcaaatactggtggcccctccagtctcagggatgtattggatccatctctgtaaatattatctcccttcccagaacctgggatagtattttgcgcaaagcaagtgcaacattttttggtataaaaatttagttttgataaataaatattttcaatgtataaaattcatttgtaaagaacataatgtaaaaattattttaatttacataaaaaataaacttggaagtaattgatccctttcctataggctataaagtatgattcctttctaaggcaatttcccttcatgaacttcaagcatttgatttttttaaatgcacaaattcagcagtatgttattacattttattgaggaatgtgtttattttataagacatgttacatcccaatgtagggctcaagaatacggaattttaaaagggaagcagaggcagcagatgtgggttaaagactagtaagagaaagtttttgtcactgttcagtgaaacttgcatgttctgtgttctgttgtgcagtattattacagcataaaggacatcagcattggtgggcagtgtgtttgcaatggccatgctgaagtgtgcaatataaacaatcctgaaaaactgtaagtacactgtacagatttttttcagccttactatgattaagtctaattatttcagtggatgtttgcatcccgttaaatgtttctaggttcctgtcctcaataggaatgattcaggatcaatgaataggtggggggtgtgtgcctcctctccaccaactctccattttctttcacataacccctataggccctggcagacacggctaatcaatcacagcactctggaaaatctgtgtcccagccaccagatcacccccaagacatacctcaggcagccaattgattagagctggcaagagaaataaaacttgtcattcctggtttaatgggatcagggtatacatttcaaatccttgttttttaaattgtggtgaaatacacatcaaatttactattttaaccattttaaagtgacagttcagtagtggtaactatgttcacgttgttgtgcaaccaatctccagaactcttcgttttgcaaaattgaaattctatacccgttaaacaactccttgtttcctcctaccactggcccctggcaaccatcatgactatcctaggtacctcatataagtggaatcatacagtatttgtccttttgcaacaaatactgggttattaaatttgtcatcacttatttcacttagcataacgtcctcaaggttcatccatattgagcatgtgtcagaattttctttttgttcaaagctgaacagtatttccttgtatatatgtatatattacattctgtttatccattcattcgtggatacacacttggggtgcttccaccttttggctattgtgaataaggctgctgtgaacatgaatgtaccctttttgtttttagtttgagtatattttgcatacaataatatgcatgagtcttaaatgttgaggttcagccatacatttgtgttaccactgcaagagggatactttaaagggctggaaattaccggatgccagatatagtaatcattttatctcaatgtttaacttaaagtctacaatatttcatgagcagcatttaccagagatgtatttcacttttagtcagattcaggcttgtgcttctttaggtctagctttgtgttcaggcagaattgctagttctcaaggtctgtgatgtgcgttgtggggcccttctccttgaccagccataacccttaatgttgttgttcccccttcaaggattcggcagtgctgttgagagagcttacgcacaaaatgattaaactttagtggaaaatgacttgtttattaatggttaatctatttccaccctgtaatctcctatctccctaagacactagaaatcaggtcacataagttctgagttggagagaggagagaagaggtccagctaatgtccctgagcctggaacaaaatactgccatgtgggaaaggagtacacgccatcacagagggcatgagcttcctgcttagaaaggctactgaaccctggagaccctggagaactggaggagttctacactgggtggttaattctcccaatacacatgtgtggaggtctccccaagccttggtgaaaggctcagtttggcagcaatccacttcaacatgactgcctgcctttccttgtctgctggtttgcttctgcccaacaggctgaacttgaacaaatgctgatgaaatccacatccatgatgaggtagaaatcttataacaatttaaagggattcagaaacttaatgggtagagccaagcctggacaatcagaaaaattacttgctaatgaggcagaacccaagaagaggggtttaaccaagcatgtgtaccatgttgaccttgctgcatggataagcggaaggacctcaaatttaattctgagcttcctagcagccaactcaaaaagggaaatctgcttggtttcatatttcactatgatcataagctaaaaagtaataagttacttagaaaaaacatgattgttgacactagtgccaaataacaattttccctaggggtggggcagagtggtcatcacgaagggaattctctaatcaatgacatctttaaataacatatttacagcaggtgtattattaaccatcagtctgggctgcaacagaggaaaagcagtgatttggcagtgccaatgggactcagatgggtacccagctcctttttttgctatgctcaattttaatccccctatgtgtggagttggactacatattcttgaagcagtcttccctaaataatcttgtagtctagctaatgtcaaatgtttaattggcaatgagctgaaattgcctctccaacaagggcccatttggatgccacttgttctgtgctgccaggtagatctatgtccatgtgctttaacaggcagttgagtgtggagagggatgacaccctctcttgggaataaaactgaatatatgccacgccaccttcccttagagtagagttgatggaatccctacaggcacagccaagagccttcttagacaaggcattttgctgttgttcttttaatagtctcgggtctttatttgactcaaaccgaacactgcacgtctctcatatttaaaaaaaaaaaaaagctgtttgctcaatgccgcacaaacgacggcatgcggggacacccccgccgcttcccccgcccccacccccccgccaaaaaaaacccaaaaaaaccccacaacccaaacccaaagcctctttcatattcacgatattcaggaagcaccagctacggagtcaagcatcttggtttagatttagtctctgcctacaatcacggcctttgtcaagtgagtttatctctgagcaccagtatcgtcatctgcaaagtggggcaagttccatctaccgcagtgagacaggaaaggggctccaaaactgagagctgccatcacagtagatgttgtaagggccggacgaagaactccagaatcctggtgctaccagcacacttcacctgagccacggcatcccaggctcgggagtgccaagactcagggagccctggatggggcgcctgcacccagtccttccccaaccacgtggcaaccatgtgctcccagtggtggttgcctcctcagtcccctccaagcctccccgctccccgttccctgcccccgccccccactcccttcccccgccccgccccgccccgccccagtaactggctgaagcaccagggtgaattctgggtccaggagccccagactctgaggcctggggactggagaacaacgccaggctgggcgtctgtgccctcctccaacagggaggcgcgtgcttccccgcaaacccagcctcctggaccaacccagcccggaattagaagcctaggacgcccacctgacgcacgctcctaggaaaacaaccactacccagctccaagcaacccgaactttcggcaggctggttccaccttacctcaggccctgggcctcgcctggctcacgctcctgaggcttcaggccgtcttcccaccccttcatgcccccggctgcctcgtggctcccatccttccagatccagcagctcttcccacttccctcaggcctccagcctgcttggcgctctccagcagcccgggatgcagccggattcccacctctaacccttcccctccccttcctcctctccagcccctcctcctccccagtcccctccccagcccccaccctcactgccactagacccttcttggcctcgctccagctccccccagcagttgccaaaaagatagttctgaggcctcagggggctcatccatcgaatcttctgtggagtggtggcgcgatcttaggtgagagagagaaggcagacaaagaggaacgactcctgctccacagacagctgcgcaagacggaatcacaccagggctggacaatggttttgaatcctctttcaagtacggaaggagggagctcaaagcttggagttccaacccaaagccaaggctgaaacaatttcattttaacttggaatgttaaggcagatgtacacccttttgaaatgagacttttaaccctttgcttctctgagtggtctcagcttttggccccatgatggagctggcgcagcctctggaagcagagccctctgggatcttattagcagctggtccttgaattgggtaaagcatgaccacaggttgagagtaagaaacttgagcagatcttagtcgtaggactccagatctttatgcaggtgtgatacttaacacatctcagtaaagtcagcacttgagtgctcctgtgttcctttattgtaacaatggggtagagaagacagagctggggcctcagagccaagtgaggttggaagtctggctctccatttatcactgcctgacccttggcaggtatcttaatacctctgattctcagtctcaccatctgtaaaatggagataataaataagcaggatatgggaggcttaaataatacttgcgaagtgttgtgttctcctaattcctcaatgaatggtgccgtggatgaccgtgatgactcgtgtgtcaggttcgcactataggatcaactgatcctcatcaaaacttttcaataactgagatgcacttcgcccacatgcccaggtttcggtgtgaatgccagcaccacacctgtggggagacgtgtgatcgctgctgcacagggtacaatcagaggcgctggcggcccgccgcttgggagcagagccacgagtgtgaaggtgggtgtggggatggggtgggggccacacgtggccttctcccccctctccctgggggctgaggctattttccccatgctagagaagaggctgtggtcatgtcagtgttaggggctcaagtctgtctattgtaataagaacctcagactgcagggaaaagtgccctcctctgaattcagatgtacatttgagaagaaaaagaacaataatgatgatgaccatgcatgatggggctccgtgctttaatacgttgacctctttttttagcaatcataaatatgatgcaaccactataaaattttaacatcttatccatttcataggacgtgatactggataggaatcaactattttgaggaccaaggtccagagaagacggcaaggttgagtctaaacagggagctgggagtactggagtatggagtgctgggaagtgtaacatggtaggattgaggaggatggagaggaccagagaaggaataaaaaaagttgggaaactgcttttaagagtgtaacataaagtaagaaaagcgttttttttttgtttttgttttttaggcctgatgtggtggctcccagcactttgggaggcaaaggtgggaggattgcttgaggccaggagttggaaaccagcctaggcaacatagtgagactctgtctacaaaaaattgaaaaattagccagaggtggtggtgcaggcctgtagtcccagctacttgggaggtggaggtgggagaatggcttgagcccaagagttggtgcagtgagctctgatcctgccactgcactccagcctgggtgaaaggataagatcctgtcaaaaaaaaaaaaaaaaaagaagaaagacaactgctatttttaacaaacaaaccctaagacatccaactatagattttcttctaaataaatctccttgtgaagctacatatttattccagttgcagaaaacatttcattcactgcaacctctgcctcccaggttcaagcggttctcctgcctcagcctctccagtagctgggattacagacacctgccaccatacctggctaattttgcttgtttgtttgtatttttagtagggatggggtttcgccatgttggccaggctggtcttgaactcctagcctcttgggatccacccaccttggcctcccaaagagctgggattataggactttatactttttgaccaaatattttttgtaactattaggagataagactgatgatctcttatggccagtaaacttatgtaaaaggtgttcccagtggtcttccaagggagttttgagagatgctaaagttctgggaaggtcttgtggccatctcagggaaatgctctggcgcacctctgagtcccaggtgttgcttggatggccatctcactttatagtcacagctaatcggttccttctcaatgacttctccattgctcaccccagatgaggggaccagagagagagaaaggtataataaaagtaaccaggggttgtttcttttgctgctttcaaacactgatttaggatatttttaattgaattaaccattattacatgaattccagcatttgcaacctgattagttttccagactaatggaaccctttgtaaataacatgcttcactccaacacatacaaaaaaaatttaaatctcctttaataagtttttatccttttaaaatgtattaaattgttaaaagttacaaaaatagtgcatgaaaatcagacctatcaggatccatttattaggtgctttctaaattccctttgaaatatacaattcaaaataaacagacttcttaactgatgtagtaaatataaatgtcttgattttttaaaatcatggcaccacagagaaaatgaagataagaaagcattgagcctgttttacaagttatagggtaatttgtgtaatatctaattaagtcttccttcacatagtcacctgggaaattgattaaaacatacaaattactaacaagacttggaaattttgatgtaattagaatataatgaatatatagtctgcctaagaaagaataagaattttactcatgttaaatatttttcattgtggcaaagatgaaaatcccaaatgagttttaaattatactttgtaattttagaagtgttatatactacttgtagataacttggaaattaaaaaaataaataaagtaaaatcaccaagaatttaactaccccaacagtgtcttagtctgttcagctgctgtaacgtctgggtagcttataaacaatagcctcaaagttctggaggctggtaagtccaagagtaaggcaccagcagattcggtgtctggtgagggcctgctttctggttcatagatgccactttcttgctgtgtccttacgtggtggaacgggcaaggaagctttctgggcctcttttataagggcacttatcacctcccagagggcccatctcctaataactggtgattaggtttcacctatgaatttggggtggggggggcacaagcgttcggaccatagcagagagctactattaatattttgttagatacgtagtattttatacatactttaaatactcaagattatataatctacataattttatatcctaattttttcacttgatatttttagctatttccccatgttttcccaatcattaaaaatgctttgacatcatttttgatggtacagagttttgttccaagtgtttgttgagtacccactgtgtgctgagaactatgctctattgcaaacaaaacacatacagcccttggtgtcatagaacttaaagtcaaacaaatatattgttgcttgctgagccattcccctacaattaaacattaagattattcccatacgattaccatatagtgttgaaatgaaaggtttagagtgttggctaagagcataggttctgcagtcaaacaaagacaggttggaatttcgcctcttctagttataagctatgtaacgatgggcatattcctcaacctaagccccagttttccaatctggactatagggatgatggtacctaccttagagagttactgcacagattaaatgagataattcatgtaaagcacttttcacagtgtgttaagagctcaattgctattgttagtagtagtaatagtggtagtaataatattctcttcgtgcatgaagtttaattggcatttggatgtattttttttgacagtgaaattttattttattgaattttgtatgtataaaacatgccagtaaaataaagaaataatgaaacaaagattatatacaaaagtttttgaattaatactatttaaatacattagttgttaagggaaaaattagagctacatactggtctttcacagtaataaataataatgttagtgtttaattgcaattaaataaaaactccaactaaaataaatatattgctgggtgggtggctcatgcctgtaatccaagtactttgggtggccaaggcaggaggatcgcttgagcccagtagttggagatcagcctggacaacacagtgaaaccttgtctctacaaataattaaaaattggctggtcatgatggcacgtgtctgtggtcccagctgcttgggaggctgaggtgggaggattacttgagcccacatagttgagactgtggtgagccgtgaccacaccactacactccatctgggtgacagtgagatcctgttgcaaaagtaaataaataaaataaatatattattcaagttgttgacctaaaggaagatgctgcggcacaaaatacagttttaaggaggttacttaatggctgggcgaggtggctcatgcttgtaatcccagcactttgggaggccgaggcgggcaggtcacttgaggtcaggagttcaagaccagcctggtcaacatggtgaaaccccatctctactaaaaatactaaggttagctgggtgtggtggctggtgcctgtagtcccagctacttgggaggctgaggtgggagaatcgcttgaacccaggaggcagaggtcgcagtgagtcgagatcgtgccactgcactccagcctgggtgacagagcgagactgtcaccaaaaaaaaaaaaatttacttgaaccaaaatgaggatagctgccccgacacacttccaagttgccttgggcagtgctcctgcatttcagtgtaccttcctttgaagatatgattatatatctttctttgggagtgggggcggtggcagggagaatggagtctcactctgtcacccaggctggagtgcagtggcactatcttggctcactacaaactctgcctcatggttccaaggattctcctgcctcagcctcccaagtagtatatatatatattttttttttttttgagatggagtctcgctctgtcacccaggctggagtgcagtggcgagatcttggctcactgcaacctccgccttctgggttcaagcgattcttctgcctcagcctcccgaatagctgggactacaggcacatgccaccacgcctggctaatttttgtatttttagtagagacagggtttcaccatattggccaggctggtctcgaactcctgaactcattgtgatccatccgcctaggcctcccaaagtgctggaattacaggtgtgagccactatgcctagccccaagtagtatttttttaaaaaaagagaaacttcgctcatggaatatcaaatgaaaggagctctaaactgtatcttagtatatcctggtctttgtgtaaagatccctaaaaattttcccctaagagtgtcctgggtgttccagaatatacttttttatagctcaattagcagtaatactatttacgctatttactaagcgtctgatagtaataatgagaatattgacttattatgcttttttttcagcatgcaactgccacggccatgccagcaactgttactatgatccagatgttgagcggcagcaggcaagcttgaatacccagggcatctatgctggtggaggggtctgcattaactgtcaggtgaggcactatttaaatcaaagtggatgtgttgtcatggggaatgagtattcagtaagctctgctcctgaagagatgtcaagaaagtggcaggcaatcgtaagagttttctgagaccatttctccactgttgctcacacaaggccttgttagctggatgtaatttagggattgtaaggaaaatggactgaggtatgtttacccacacccctttgatcagtttctcgatttaaattttgcctaaatggagaggaggattccaggttatcatctctggctgctatccaacttgtgatagaaaaactctaagataggaggacaagtagttattaatgttagtgctgaccctacatcctgttttcagacagattctgagtctagactcagtgaggaaatgcatcatgatcaattaatgatgtctttcatagacatcaaatatgaaacactaatttttcattccttctgtaggacaactggtttcactggaatttagttaagggagtgtatggcggaagagggcatctcttcattgagatattcattaacagtcctgtcaaatgtttatgaatttggtctacattgtcattctttcttgtgttcttttaggtgttttgttaatgttaccactgaagaggcgttcttcacatgagatgcccattaatatgaaaccagggctacatacccatagagagagccaccattcttcatttgtctcccccctccatacttttatattatctgttattgcagataattaaaatataagtaaaatataaaatataaaataggtttgttacaaatcacaaggttttatgtataagtgagaaatcccaggataaggctaagcactataagaccttcaagtgatttgtgtgcatattaagttgcagaaacactggactagaatgtgtaggtagaatcttttctctggatgaaaggtcaagccccttcaatgtgtctttagaatactttgttattcttcatcattctctcagtgatattatgttttgtactttgctgttccaggaaaccatcaatgtagtcttttttttcatagtgggtctgcaaaaacattttttttttttttgcttatgaaattactgaactgttatttgggtgtactgcatttgttttccaacttaaatttaaaatgccttttactcagttagatatttaggtagcgtaattaactttaaaatgtttattgtggtaaaatagacataacataaaatttaccattttaaccatttttaagtgtacattttagcagcataattaacttttatattatattgataatcaatggacaaggaaagagttctgcttcttttatggtttagtggctgctgcaggactgaaccctcccatggaggattggtctcaattgattgtcttttctcttaagaatgggtcatattttaggtgttcatatgataaactatgggcaaaatacaaaagacaaataaacaaatgacaaaaccacaaaaaccatgatctgaaagcactgaagagtaaaaataagcaggaagatactggaggggagctgcaacttggcaaaacagatcagcatagggtgagttacatatttttatgacttttacccagaggggaggccaaagttggtcccatgtggtctggctaaaatttctctagaaatatggaacctttgtcttaaagctgtgttctctgaggaaccagagagcagagcttaggacaactccaacttgtggaaagttggtggggagtccaggaaaagagaagtcaagagcagggaaatccctaattctgtatataaattcttctcaagtttctgactgacccctcagtccgttttccatacaatccaagcacaggatggatttcatctgagactgaaataacttacttgacattttagttaccacttaagagtcagaatgtgcagcttgagtaaagttaattgtctcataaagaaaaaaaaccattttttagaggaatgctaatggatttggaatccttacaacacaatattcacaatgtctaggctacaaccctagattttgtaacatatgaagattcaaaaaaagtgacccattcttaagagaaaagacaatcaatagggaccaattctgacatgccccagatgttgaaattagcagttaaggattttagagctgctattataattatgctcaagagaatagattaaaatatagtcacaatgaatgaaaagataataaatatcagtagggaaataaaaactgtaaaaggatcaaaatgaaaattctataactaaaaaatgcaatatgttaaataaaaaatccattggaggggccgaatagcagaaaggaggtaatagaagaaagagtcagtgaatttgaagatagattagtagaatttatctagtctgaagaagagaaagaaaaatatatatatttcaaatgaacagagatttgggaactggtgagacaatagctaaagatgtaaggaacatgtaattggactcccagaagcagagaagagacaatgaatcagaaaaaaaagtgaagaaataatagtaggaaatacctcaaattttgcaataggctaagattcaaaaagcttaatgaaccctaacctggagaaatacaaagaaaataattcctaggcctagtggagtcaaactgctgaaatccaaagacaaagtgaaaatcttgaaagtagacagagaaaacattacaacatagtatgactgtggactttttattagaaactggaggtcacagaaggaatagtatctttaaagtgctaaaagaaaaaagaaccatcatcccagaattccgtattcagtaaaaatatccttcaagaataaaagcaaaaagaaaattgtttggtagataaaataaaactaagagaatttattgtctaagagacctacactacaagatatgctaaaggaagttctttaggttaaagagaggtaatacgagatggaaactcagatctttaggaagaaatgaagagtatggtatgtgtctgggcaaatataaagtactatttaaaaacaaattcttggctgggcgtggtggctcatgcctgtaatcccagaactttgggaggccgaggtgggcagatcacctgaggtcaggagtttgagaccagcctggccaccatggtgaaaccctgcttctattaaaacatacaaaaattagccaggcatggtggtgtgcacctgtaatcccagatactcgggaggctgaggcatgagaatcacttgaacccaggaggcagaggttgcagtgagccaagatcatgcctctacactccagcttgggtgacagaaaaagactgtctcaaagaaaaaaaaaattcttggaagtcctagccagagcaatcagtcaagagaaagatatagaagacattcaaatagcaaaagaaaaagtcaaactatctctctttgttaatgatatgattctatacttagaaaacctaaggactcttccagaaggcttctggaactgataaacaacttcagtaaagtttcaggatacaaagatcagtagcatttctatgcaccaataatgttcaagctgagagccaaatcaagaacacaatcccatttacagtaactgcaaaaaacaaacaataaaaaaagcccaaatctaggaatacatctaaccaaggaggtgaaagatctctacaaggacaactacaaaatactgactgaaagaaataatagatgacaaaaacaaatgaaaagacattccatgctcatggattggaagaattagtaacattacagtggccatactgcccaaagcaatctacagattcaacgctatttctatctatgtcatttttgacaaaactataaaaaactattctaaaattcagaagaaaccaaaaaaagagcccaaatagccaaagcagccctaggcaaaaagaacaaagccagaggcataacattacctgacttcaaactatacagaatacagaactcaaaaataaagccacacacctacagccatctgatcttcaacaaagttaacaaaaataagcaatgaggaaaggactttttttcttttttctttcttttcttttttttttttttttttagacagagtcttgctctgtcacccaggctggagtgcagtggcacgatctgggcttattgcactgcctcccgggttccagtaattctcctgcctcagcctcccaagtagctgggactacaggtgtgtgccatcatgcctggctaatttttcattattagtagaaacagagtttcaccatgttggccaggctggtctcaaactcctgacctcaggtgacccacccgcttcagcctcccgaagtgctgggattacaggtgtcagccaccgtgcctggcaaggaaaggtctttctattcaataaatggtgctaagatagttgtctctccatgtgcagaaaaatgaaactggacccctacctttcaccatatattatacaataattaactcaagacggactaaagatttaaatgtaagacctcaaactataagaatcctagaagaaaacctaggaaacaccattctggacattggccttcggaaataatttatggctaagttctcaaaagcaatttcaacaaaacaaaaaattgacaaatgggacctaattaaactaaagagcttctatactacaaaaaaaaaaaaaactatcagcagagtaaacagacagcctacagagtgggagaaaatatttgcaaactgtgcacctaacaaaggtctaatattcggaatatatgaggaacttaaatagttcagcaagcaaaaaacaaataactccattaaaaaatgggcaaaagacatgaacagacactttgcagaagaagacatacaagtggccaacaaacgtatgaaaaaatgctccatatcactaatcatcatagaaatgcatgtcaaaaccacaatgagatatcatctcacaccagctagaatggctattattaaaaagtcaaaaaacaacaaatgctgctcaggttgcagagaaaagagaacacttacttatacattgctggtggggatgtaaattattttagccactatggaaagcagtttggagatttctcaaagaaaacaaaactaccattcaacccagtaatcctattaattggcatatatccaaaagaaataaattatttcatcaaaaggtcacatgcactcatatgttcattggagcattatttacaataacaaagacatggaatcaaccttggtgcctatcagtggtggattggataaagaaaatgtggtatatatacatgatggaatattacacagacataaaaaagaatgaaatcataccctttgcagcagcatggatgcagctggaggtcattatcctaagcaaattaatgcaaaaccggaaaaccaaacgccacacgttctcactttcaagtgggagttaaacattgggtactcatggacataaaggtggaaacaatagacactggggactactagaggggagagcgaagaagggcgacaagggtcgaaaaactaactattgggtactatgctcagtacctgggtggcaggatcaatcatacaccaaagctgagcgccatgcaatatatccagctaacaaatctgtacatgtaccccctgaatctaaaattagagttgaattttttttttggaaaaagaattttaggaaactacctaccttcccaacccctctttatttccaaatctctgcccttttatggtaatacaatgatctgtaattattttcctttactcaatcccatttgtaaatgttttagaggagagaataaataatggaaaaggaaaataaaagaatattttgtaaataatacttcaatatagctggaaaaaattagagtatgtagggccgcttacaacaaaatttatgacattgtctcatggtatttataaaatgcatgtaaatataatacatatgcaacaatagcataaaaaataatacaatattaactctaatttgactgtgagacgtgaaggatatatattgtagtccctaaaacaactgctgacaaaataatgcaaagaggtacagctaaaaggccaatagatacttctaaaggtaattttaaaaacattcaaataatccaaaaaatagataaatgaaggaacaggggatgaagtgcatgcatgtgcgcaagcacacacacacacaaaaccacatacacacacaccagacacaaaaggaaggggcaagcagaaaatagatacaaatagtggtagacccaaatccagctctataaaaaatactctaaatgttaatggactaaacactccaattcaaaggcagaagcaataagaatgaataaaaaagcaagactcaactatattgttcacaagtacttacctttaaatataaggacaagttgaaagtaaatgaatgggaaaaaatatactatgtaaacaataaacattagaaggatagagtaaaaatatcaggcaaagtaaactttaagacaaagagcattaacacaaataaagacatttcgtaatgctaagagtaaattcatcagggagacagtaatcataagtgtgtttgcatctaacaatagagctttaaaatacatgaagcaaaatttgacagaattagagggaaaaatagacaattctatgatcatagttggagatttaaataccatcctattggcaatttataaaactagacaaaaacatcaacaataaccatgaaaaattgacaatttagattttatcaaaattaaaaacttctgctcaaaacaaaacatgctattaagaaaatgaataggcaagttacagacagaaaatattcacaaaacataaacctgacaaatggttggtatctgggatatacaaagaacttccacagctcagttataaaaaaaaaaacctcaaaaaaattcaaaagatttgaatagctacttgacaaaagtagatatataaatggccaataaatgtacatcaaagagcttaacaaggccgggtgctgtggctcacgcctgtaatcccagcactttgggaggctgaggcgggcggatcacgaggtcaggagattgagaccatcctggctaatacggtgaaaccctgactctactaaaaataccaaaaattagccgggcatggtggcgggcgcctgtagtcccagctactcgggaggctgaggcaggagaatggcgtgaacccgggaggcagaggttgcagtgagtcgagatcgcgccactgcactccagcctgggcgacagagcgagactctgtctcaaaaacaaaacaaaacaaaacaaaaaaaagagcttaacattattagtcatcagagaaatgcaaattaagattacaatgacatactactacatactccccaggattgctattttttcctcagctttaaaggatgactattattaaaaaggctgacaacatcaaattttggtgagaatgtggaataaccacacctattcatcattgttgataacaatgcagaatggtacaactactttgggaaaacggccatttaaaaaaaataaagctaaacatacacctatcccatgactcacaatttccactcataggcatttattcataagaaatggaaatgtttgttttcaaaaagtttatagtagctttatgcaaatacccccaactagaaatagcccaggtgaccaacaatagtagaatggatgaagaaactcaggcataactatagaatgggactctgtggagcaacagagaggaagaaactactgatggatgcagcgacatgcaagaatcttaaaaacattatgctcagtgaatgacgactgaaaaaacacacacccaaaagtatcagggccatttaaatgaaattctgaaacaggtaaaagtagtccatagtggagaaagtcagaaatgtggttgactttgaagagttgatgatggagattgactgtgaaggggaaagaggaactttggggtaatgatattgctctatatctagataaggaattggatttcacagatgtatgcatttgtcttgactcagtggatgtacaattaatagttttgcacttataagttttttgcacttgtaaattttataacagaagaaaaaaactgtaaacaaatactgaattccagctagttaaatgcatggtgaagtatttaggggaaagtgactgatagctgcaatttattttgaaatgcgtaagagataagatgaattagtggatggatagaggaatggatggatggataattatgtgataaagcaaatatggtaaaatattaatggtaaattgtaggtgggggagtgtaaaggtgttcactgtaaagttgggaatttttcaagataaaatgttgaaagaaaagagtaatgaaagaagaaagccaggagcacaacatttttggattgactccttcttgatttcttttcccttaaatattgatgctcttaactaagattgaagattatccccattgtttgagatgatgcatgaagatactttatctccatgaactaaaacaaagtctttcacctcttccacagagatgtgacttctgatcgaagtctttttttttttttttgagacggagtcttgctctgtcaccctggctggagtgcagtggtgtgatttcggctcactgcaacctctgcctcctgggttcaagcaattctcctgcctcagcctgctgagtagctggaattacaggtgtgtgccaccatgcccggctaatttttatatttttagcagagacggggtttcaccatattggtcaggctggtcttgaactcctgaccttgtgacccacccactttggcctcccagactgctgggattacaggcgtgagccactgcacctgggctgatctaagtcttaaactcactccctagttgtgtcgttgttatgttggtttcactatttccagtctagttaacctgatgtcctctgtctatggtaagaaacagtggcaaacaacagatttgagggttaattgacatcggatgggaaggtgggccacagctgtttctgatttacccaccatgtttatgcatgtaaatttcaagtcacagaagtggccaatgtggttttagacctcaacattaaagtgaattcagattttagcctatgggaaaatgagcggtaataaagaaaagtctgtagttaataaaattatctaaaacaggagaggatacagaatgggtctttgttctccctctgtgtttctgtgcagacttttgtgtgggtcaaattgtgtttttgttcttgttaacttcttattgcctttcttttcattagtgaaagaacattgtcctcctaattattcccaagttagagcaaaagaggcagaaatgagctagatccatagttttggaaactgatgatgcatgttgggtaatttaattatgtggcaattacaaggattaaccatgaactggaaagagctgcctagtattgtactttaaaatgagctccgtgtatgagactcatgcctccattttccattcatgaaacagaggtattcagaaaagggttttatgactaaagcacagataaaattagaacgaagagagacaaggatctgtatatgttattccttccaaaattggagaaggtgtaaatgcacacatgacccttgggttaaactgtgcgattcattatccattcgtcagttcttctgaatgaggctacgagaacagtcctcttcagtgttttctcactcacatgtcaggtgcttcattaaagcaaattcttcgatcaaggataaagcctgggcttgtccagttgatggaatgtttcctttcctctcccaataagaaaaaaattccagagccaagattaagccaatcctatggtaaattttggtcaaggtcaagattaatgcttttttaaattattatttcagtgacttcaaaattacaattgtatatgacagaattattcctctgggtgagtagcacaaaataaggagaatcgtcttccccagaacccttcctttaagtttcttttgtttctttctagcacaacacagctggagtaaactgtgaacagtgtgctaagggctattaccgcccttatggggttccagtggatgcccctgatggctgcatccgtaagtttcatttcaagttggtgtatcttagcctgtgtgtactgcctcagcgaagtcatcaggctaactttggatcagttaataacttccttcatgccctctctcttcagagtattagttgtgctcgctatgtgacctcagtcacttacacagtctctttgaattttggatttattgcatgtaaatggaaatgataatgtatttcataagattaaataaaatgcaatcaaaagcatgtaggaaaatacttaccattgggcctgtcacatattaggcctgtgataaatgttagtttctccattttctgttgttttgacatgtttctatgatctctaataatttcaatttttgggctggaggcagtggctcaggcctgtaatcccaggactttgggaggctgaggcaggtggatcacttgaggccaagaggtcaagacaagcctggtcaacatggtgaaaaaccctgtctctactaaatagaaaaaaattagccaggtgtggtggtgctcacccgtaatcctagttactctggaggtggaggcatgagaattgcttgaacccaggaggcggaggttgcagtgagccaagatcacgccactgcactccagcctggatgacagagtgagactctgtctcagaagcaacaacaacaacttgaattagaacaagacaacacagtaatgagttcataaggatttaataatagtcacattgtttaaaatagctaatatttgttgagtacttgccatatatgaggcattacctaaatactttcacaaaggtcttgtttaattattacaacaaataggacattgtattattgtcctcatttttagatacggagaaaccaaacagtctgagtagttatatataatttaggctaggtgacaaaaccgctaactgctagatccaggatatagttcttttctgtctgacatgactgtgccataactcttctattatacagaagaatgcctctagtttttccttgtagaattatgaatcttgggtcagatttacagacttttccctacatgtgcaacctataccctattcaatgcttggttcttttaagttgtctggttgtcacagttggaaagcaattccagtcctgaagtcaatcctgtgcccactccatgattaatcataccattaacatttgtgggtattaaagtccagggaatatgtagatggatttacttctctctagggcattcttagttgttaaaaaaaatgtgttttcacttttcttccttcttccacatcatgctgcaaagtatgtctatcacctgtcttgtgcctacaaagaataggcattgggaaaggaaaacaggacattgccaatgtaattgtacctcattaggagcctcactgtttcatcacctttctagttttttcatcattgaagtggtccacagaggtattagaggcttggcgtaaaggatcagtaggacacatgaatcctaactaaattaagcaaaggacaccaggatgccaggtcacccaggtctttacaggagatgtattcagatgagctgtgacagtattttccctgtccagggtgcacctgccaggtcaagggaggcccccaagtgggaggtcgacaatcttcttatacttgcactatgccttactccagtgcaagcctgataatcgtgcccgataatcgtttttggttgcaaaagctgccttcagtaagccatttcactcagattaacattttttttatgggtcttggtctgctgtccacagactctatctccatgtctaggcactccacacttgcatctgtatcataactgtgtattgatgaccactttgtgggcattcacagttggttcatagctagaaagggctgtgcccaacagaactaaggcaaatacccccacccccacccccaacccctctgactgtagcatgcaggctttgcctctgactcagtgagctgggcaatgctcagtgggataaatgacatccatgagaacttctgtgtggacgctcattacagctgatctctgacagctcacgagcttcgggcagtgagaaccatcaatcaggtgtgaggtgggaaataggctgtgccctttcaagaatacctatagaccaaggatcaagtatggaacgttgcctgggaagtgttggaacatatttgctttgttaagtgcagtgaaggacggatcctttgaaaactgggatttctcttagcctgcagctgtgaccctgagcatgcggatggctgtgaacagggttcaggccgctgtcactgcaagccaaatttccacggagacaactgtgagaagtgtgcaattggatactacaatttcccattttgcttgagtaagtacccactgcagaacaagaggccaccctttttggtccatagctggcttttgtgcactaacctctgaggcatggtggacaggtagggaaggagagacagaaatggggccaggtgggttgtatttatgtaaaagtgtttctgaaagtttggaatataaattttatattggtacattttacagtcttatttatctccaaagtgttatgttgtgccacagaaattgccatctcagtaggtcaaaaagtcaaacattggcaattttaacttaataatccatgtgtgtgatttttcctcctaaatgtaggagaaatatcatgggcttccagatatttatctgcatgcatatagtgtgtgttgtgtttcaggagcccagggaaacgtttcctctctcctgctgtacaagaggccaagttataagcacccagactccaccccacggcagtgatctaagtgaacatctcagcatcaccaagagaaaaaaatacatatctgtcagaaacactgtagagcatgaaacaggagaatctgtgaaaccagctatgcgaactgtgatgagtgttggctctgtttgttgtgcagcagtgagaaaactgcactttggggttaggacaaagaaacactgtcacaaggagagcctgtctctctgtatcactctatcagatgtttcctggccccaccctcctgactcctgcagagccatcataggaaaagcatattgagttgtggggacatgggggcaggactcacatgaatgggtaactatatgttctcattcacacctcccaccccaggtaattgcttaaattgcacccactttctctgtggagactgtcctactttggttgatgagacaccacatcagaattttatatctgtgagtcttggtagaaggctgaacagaaattgtatttgccttttttttttttttttgagacagaatttcgctcttgttgcccaggctggagtgcaatggtgcgatcttggctcactgcaacctctgcctgccaggttcaagcgattctcctgcctcagcctcctgagtagttgggattacaggcatgtgccaccacgcctggctaattttgtatttttagtagagatggggtttctctatgttggtcaggctggtcttgagctcctgacctcagattatctgcctgcctcagcttcacaaagtgctgggattacaggcatgagccactgcgctcggcctgcctttttagtgaaaagaagaggaagaaacctgaagtagttttatggcataaacaaaatgtcaggagaaaaaaatgaaagaaaatatttctttaaagctttgattttatgttaaaaaaaaaaacaataaaaaagctaaggaagccaaactcatccctgctcaggctgagacttagctattgtgagcacgaaacattcatttctgttcatcgttatacaaatgggaatgtctggccagtctggtttcagttactaaacacatttgagatatagcaatatcgcctttctttaaattagtctctatatgctacttttcactaagtgacagagggtgtcttcctagttagtacaacttaatgttttactttactatctccttaatcatcctctgtattttttaataaactatttttacaggaattcccatttttcctgtttctacaccaagttcagaagatccagtagctggagatataaaaggcaagtaacctcccttttggtttaactccagtgaaaatgttatgcccttattcttttcctacttcctgtgtgcactgccacatccaaggccaagtctcccttcctagagcatggtaggtgccttgcaggtgtctcctagttgacctactccccacccatcagtccccactccagcctgtcttttacaagggcactacctgacgtaggaaactgtgcagagcttgtattagatatcaccagcttgctcaaagaccttcaatggcagccagtggtctgttgtcttttttgagttccccgaaaacagaccctgaaaaaggaatggagagcaagtcatttatttgggaggtgatcccaggaagggagagagtcagggagtgaagggaaccatgataaaggtgcaatggcaggtaatggcagttatctgccattagtggaggcattaatgcttctggggcattcaccctctggcacttacagcttggccttcaggaaggctgaggagcttctgcagtcccaaaacaagcccctggcagagagtagcagtggtgtgcagtaagctgtctctgagggtgaaggggtgagtactagaggatgtgggtgttacatttaccaaatcatttgttccataaatattttaaaattccctgttatgtgcaaagtaccattctggctgctggggacttagcagagaacagaacagaaaaaattcccagctttcttggagcttatattcctgtggagaaacccagataataacatacataatatagaaacccaagcaaggaaaatagctaattcattagactgtgagaggcagagttgtattctgaacatgggtgccacttttaagggggagccattcacatcataggcataaactaactcatgtgagaagattccaggcctctgcgctgggttccagagccatggggagtttcttacataaacccatcacggcatccacagggaggcacaggttctcagaagggcacgcctgcaccaaaggaagggcacagcacacgcacacagcccacgactgggcaccatcggactcatgctcacatctcctgagtttgcctctcctaccccagggcgccagcagaggcctggtggtcactggggaggaggtagtgccagtcatgtgtgagcacgagtgcccctcctcctgcagcgccacggtgtgggccagcagagaagatggtttctgaagagctctccttggcagtgaagttcaggctctacagcaacatagtaactcaggtatggactggaggcagccttggtgataagcgctgctgaaaaaacaagacagagaggaggttagggaatgtgaggtttacagatttaaattagagcagtcagagaaggcctcactgaagcaggtataggaaagagcaagtgcaaagtccctggggcaggggcagccctgggccaagggtgttcagtgaacaaaaagagaccaggtgtgtgaaagtggagtgagggaaggtgagactggtaggaagggaaggcatcaggggctggatggaggccctcgtcagccactagagaggccttctcttttactcaaaatgagacaggagccatggagagttttgcacagagaaatgatgttatatagaaggctctttgggtctactgtattgaaagaaaatctcaggagaagagaagagaagagaagaagcaagggggcctgatgggaagtttttccataatccatgaggaagagatgatggtggttcagacccaggtggtgtcagcggaggtgacagcagtggacagactgtggatatcatcggaaggtagaaccaacaggatttgctgagggattgctagaccggaagtagaatattagagaaagagagggctctggggtgactccaaggcttttcggctgagcagttagaaggaagaagttgctctttgttgagagggaaagattaaaacaagagaaagcagaatacatgggccagaggcggggtgggtgggggcagtggtgggagctcgtggatgttctcttctggctgtttttgaaagttttctctgtggaataacaaacaaggtcagagcaagaagcaagagaggagggctcggggttgagtagggagaaggtatgagagtcatccaggaatgtgggtgggaggatgggcttgggaaagtcatgggattgctgggtggcaccaaaggccccctggaggtcagttataacaggacctcagttaccttcctgacgtcattccctgcttctgccctacccacactcctcctcagtctaaccatggtgctgtgcattattgcactgtgtgtgggactgtctcatgtcagatactgggccacttgaggacagcagctctacaggatggggcagtcacgttggcttagagacctgcccgctaagactcagagagggccaggcacattctgatagctcagtttggaggctctgcatagatgccagtaacggagaatttaaggaatggtgactactgaggagaattgcagtcttgaatacttagcatattcttcattcattaaacttttattaagtgcctgtgctgtgctagtcactgccaggcagctgcctgatacatggttcctcctgcctgggagctcccagtctgagacagaaaggtcaacagttctaatggcaggagttaagtgccatgagagcatatgggaggggcagccttacagccagggtgaaggaaagaaggaaggaagaaggaagggagggagggaggggagaaaggagagagacagaagtgctggaagggcttccccagagcagcaggaggaggtatctgagctgagtcttggagtgtgaagaggagtcagccaggcagaggggcagggaagagaagccgtggggctaggagagaggggatggcagacaggtcattaaggctgaagcatgggatagagagaggaagttcaaggagaggacctagaggaataagaaaagacctgagcgggcagccagctcagatgtgtaggtttgcaaggcacagctgtgcctcatctaaggggcatcacaatcatggaagacattgcagatttgcatattgatgatgatgattttatagcaggtgacaggaaagcatcttgaggaaggggcacctttttctaatttgcacaaagatgccccatgggttgctgatagcttggaaaatgttgaaggatctattctgtcacatgtgaaggacttcgtattctgtcctgcaggcattgggtcactgtcaagggatttaaaactgggaagtgatatgaaaaggttgatatttttgaaatatcactcttgacaccagcatggagaatgaattagaaggagcaagataggaagcagagagcctccttaggaagttctcaaaataatccaggtaaacaaagatgaggtctggaactctggcagtagagacggactcaagggattttcttgagatataatcactgtgacttcgtaatgaggtgtgggatgttctttctttttctattttaatcagaattctttgagcctcaatgccaaggtaaagtccaagtttttcactgaatctcaatacttcgtttaacgccaagactgtaattcacggtaaaaacgttccctttccctgtgacattcgttctcagcctacagggctgtggcattaggaccttgtatggcagctgtgatggacggacagggtggtgctcatgccatcctgggttccaaggcttcccttgtcatgaatgtgtccttgccacttctgaaaaggaggaaaaactttcttctaccctcttaggtaccatggctgggcctagaattaaatgaacctaagacagattaacagtaaaaaagcatacaaatgtatgtaatatttttacatgtacatgagagtctctagaaggaaaatcaagacccaaaaaagccattaggccccaaagcctatgtattgtacatgtttacacaaagaacaatgaagtatgaagtgtgacaagacaaaagagcttgggctagtggcactacattgtgggaccctggctaggaagcactgggagaaactaagtgttattttagtgggtttgttggtgcagatccaatccagtcgactcccagtctccggtgataagaatgctgtcttcctggtacaaggagggcaggcacctttctcctgggaaattttatgacctgcttttaggtagaaagggtgagatcagagaacccttcctacatctgctgcttctaaagtgcctttgctggaaacagtcagtatgctaaaatggcatattctaaatcccttcacttccaatgctgtttttgtcaaattaggcaactgtttggttgaagtatgaacaagttaaaaatcatgtaaagactataaagttgttctgatttactgtgatttttttcttaattattgtattagaaaaaaataattccacaacttagttactaacgttttatttgaaaaattaagggtttagggcaaagggatttggctacttttcatattaactactattttaacccatgtagaaaatctttccaaaatgcatgagactttccttccttggtaggtagggtggacccagctgaatctttgagtcttttacgatcttccttaggggacctgttgcaaatttagatattaatgtaatttatagaattatggatgctttcagggcgaggcatggtggctcacgctgtaatcctgcactttgggaggctgaggcaggcggatcacctgaggtcgggagtttgagaccagcctggccaacatggtgaaaccttgtctctactaaaaatacaaaaattagtcagatgtggcacacgcctgtaatccgagctactcgggaggctgaggcatgataatcgcttgaacccaggaggcagaggttatggtgagcagagattgagccactgcactccagcctgggcgatagaatgaaactctgtctaaaataaataaataaataaataaaaagaaaaaagaaatagatgctttaaatatgagattgatttgaatatatatgctaatccaggacacactctgaaagttgcttttaaaatcattctcaacttgtatttttagtataatagaaagaccatgggctttgaaatctggcagttctgggttcaaattctgactctgcttccctggctgtgtgaacttggggaagttaattaacctttctgagcatcttttttttttttttttcatctataaaatacttacctgtcttacagggctcttgtttgacttcattattatttttgagcaatatttatttcccaaggaataatgtgtgctggccctgggggcctgtggtgagctctcatgaagtgtccagtctgctgggtgatttacttatctatttctgtgtcttaagtcaccccaaaacttagtagcttaaaagaacaagggttatttctctcaattgtgtgggttggctgggcgggtcttctgctggacttgctggagggtttctggggctggatttagttgggacatttgggagtatccctctttgtggccttttgtcctcaaggaggccagactggtccctcccatggtggtctcaggattcctggagggcaagaatggaaacggcaaggcctgtagtgacctggactcagaagttgcatgacaacaacacttacacctcattctagtggtcaaagcaagtcacagaccaatatgtgatcccaaaaatgaaagtgttgtgaaagaaaaacacagctaagatagagaataaaaggaggaaagtgggggggccatttatacagactggtcagggggaccttctgaggagctgatgtttgaactgacacctggtggatgagaaagagctggctgtgctgagagctaagggaagggtataccaggcagagggattggcctgagcagaggtcctgaggtgggaaagccctggatagaggtactagaagcagcctggctgtggggaaggccagtgccgggaggattaagtgagatgatccaagggaagcccccaatgcctgatatgtagtagggctgaattgatgttagtttctttccttctaaaaactggaaggaagaaatacatttaattcacgattgtcatgagatgggaatctattaaattgaagttatactttacaaagctcggctttagagggaaaataaaatgtttccacaggaatagatgttaaaagaatggtttgcaaatgaatgcccatccttacgtgttttttttaatgatatctctgaccttttgtgaatttttaaaaatttcccttcaacgcagtgtagtcttctgcgttaagaatgtttaacagccatagataattaataatctatattcccatgatagaaacctaggggaagggagaaattaagaaagtgatggaagatggagaccccttctgaaagtttcctgtcttctgcagggtgtgactgtaatctggaaggtgttctccctgaaatatgtgatgcccacggacggtgcctgtgccgccctggggttgagggccctcgatgtgatacctgccgctctggtttctactcattccctatttgccaaggtaagtgggcagaacatagcatattcataatcaatccctcaagataaatttcctcctgaggaaatgcagatctttctggcagagctgtctggcttgcagtttaataaatgggcccctggcttatatatggatgttacatgtgatggtcctacctggaccttgtcacttcccttctttccaaccttaccctgcctcctccctggtagttaagcacatggactctgaaataatctgtttgggttcaaatcctggctctggagaggaggtggtatctgaacagcatttaggaacctgccaccacttctcagatcctgttggggcgggtctccagatgccagttgggtttgcaaattggaagtgtgtgaataagattagaaagatgggaaggtggatgacagaaggaggcagggtgttctagagagaggggacagcacatgcaaaccatagagacatgagaccacaaaccccctcctccccacttgtttgtatcctagtatcccatcccggcaagggtcgctgaaggggggatggaaggtgggaggaggaagtgtctggtccggtccctagagcatggcaggtatgcactcaatgctgggtgagtgaacacatgaatgaatgaatttgcccaaattattctcccctgcctcctttctactgtctgacattattcttctttctgcagacaatggtgtaggggaagggaggagaaagaggagaagattatcagtccaggatcaaggcaggaaataaaacaccacttcagacactataaaaagaaagagatttattataggtaattaggtgctagcccagaggagttgttaagagccagagcagcaggctctaggctgggcttccaaggaggcctccaatggaatggctgggttttaagcccagactgctatgtcccagtgcaaggatgggaagcccatggttggtgacttcatctcttggcatccaggaagccagagtcagagcacagctgcataaatgctcagccagctacaggatgcagcctcctccttatttcccatcggtctaatcttattcacacacttccaatttgcaaacccaattggcatccagagccctgccccaacagagtctgagaagtgctgtctttagctttccagcctctgaacactggaggatattagaataggtattaggtcatctcacctgcaaggtcagccacactaaggaactgtaagcatgaaaaactccctcccctaagctggaggacaaggtagtgaagagcaggggtggcactagctatcaacttgggcaagttacttaacccctctgttcctcagtttccaaaaaatagtgcctgtctcataattcattgttgtgagggttacatatgtactgacaggtaaagctcttagaactgaggaagtaattgttcataagttagctattcacttgcacctttcttctcctgacctatacttccctctgcatcattttaagagcttgtagtcccatttccagccatctccctgtttgtttaaatgcctgaatcccataccccaaacctttcctttacctgctggctcctggtgtgcaaaacattcttgtggctgaaaatatatcaaagggtttctttttttcctcctctctaccagccacaacttcagattcattctggtagaatgaattacaaatattctaacttattcatatggacaaagcttgtgtttatggatacaaagataatgaataaataatacaacactttaagaatgctcttttccacatttctccactactagagctaatttattttaaggtaggtagaaaatgcatgaatgtattcatgacaaagcagaggggaggaaggacttccataacaacagaggagggaggttggtagatactcttttcagtaaaacagaaattaaccagtgaaaatattttaaaaaattgtttgaagtctctgttaatggtcataagagcatatagcaaatgaagaaacaattacttaagaaaatttgaatctaggtaagaaatgagagtctctgtgacatttcagccatgacccccttcattatccatccccaaatctgttttatagaagatctacccatatgtgttgccaagaagatgggcactctctttatcctgtgccccagtttggggctatggtttgtttcattttgggaggggaaggccactgatatttctcaaccttctgcagtcctgtatagcagaagccctattccaggtgggctcagcaaagaggaccagctctctcttacccaccacccctccacttgtagggtagtagctctaacttaggcacttcaggctgagaattctgggatcccaatcaaccctacccaagctggctcatagagtagggatctatggtgggagaggaaaactgagaagaccatggcgccacctccacctgtgtccacttgtagagcatagcagaatttcaaagaaagagggaagtgtgacccatacataggggaagaagaagacaatagaaaccacttttgaatgagccagatggtagtcttagcagactttaaagcagctattataaatctgtatagaagactaaaggaaatcatggttaatgaattaaaggaaggtatgatgacaacatctaattgaatagagaatatcaataaagagatagaaattgttttacaaaataaccaaatggaacttttggagttgaaaagtataataactgaaatgaaaaattcactaaagtggctcaacagtaaattgagctagcagaagaaagaatcagcaaacttaatgacagattgatagagattgtgcagtctgaaaacagaaagaaaaaaagaatgaaaataaataaacaggccgggggcagtggctcatgcctgttatctcagcactttgggaggccaagaggggtggatcacttgaagtaaggagtttgagatcagcctggccaacatggtgaaaccccgtctctactaaaaatacaaaaattagccaggcatggtggcaggcgcctgtaatcccagctacttgggaggctgaggcaagagaattgcttgaacctgggaggcagaagttgcagtgagccaagatcgcaccattgccctccagcctgggtgacaagagtgaaactctgtctcaaataaataaataaataaacagaacctgaaagaaatatgggataccattaagcacaacatatgggtaatgagagcatcagaaagagaggagaaaaaggaatagaaaaaaatagccaaagaaataatggtggaaaacttactaaatttaatgaaaagccatctatacagctaagaagcttaatgaactccaaatagcataaatacagagggatccacacagccagacatattatagttaaaatcataattaaaattttgaaagacaaagacaaagagaaaatcttgaaagcaggaaaaaaaagactcattatgaacacaggaacaccagttagaataacaactgacttctcattagtaacaatagaggcaagaaggcagtgagagcgtatattctaagtgctgaaagtggaaaaactgtcaaccaagaatctcctatccatcaaaattactattcatgatcaaggctaagtaaagactttctcagatgaacaaaaactaacagaattcacccaacctgacttataagaaataatagacataataaaggatgttcttaaagctgaaacaggtaccatcaaataataatttgaataacatgtaaaaattacaaaagagagtataattgaatatttttatacattcttctcttgactgattttaacagaaagtatacgaactgtatatacaaatacatacatacatacataaatatggggcctatatcatataaaaatgtaatatgtttgacagtagcacaaaggagataggtgagaacaaagctgtattggagtaagaaaatgacaccaaatctataggaagaaataaagagaactagaaaggataaatagagtttataaagacactctataaatatatgcttgatctcctttcttctattatcttccttagaaaacatagattatataaattaataattataaaaatgtattgctggattttaatatagagagacataatatgtataataacaatagtacaaaaatggtggagagggaatagaactaaataagagtaaaatttctctattttactggaactaaatcaatatgatactaatgtagatttctttttgtaagccctagagcaaccactaacatagtaactcaaaaatgattaaaaagtcatgaaacagagtaaaaattacactagaaaatatctaatacagaagaaaacaataaagggggaatagaggaacaaaaaatacatgagatatacagaaaataaaatgcaaaagggccaaggtaaatccaacactatcaataataacattaaacatgagtggattcaacctcatactataaacaaaaattagtacaaaatgtatgaagaaactaaacgtaagagctaaaactataaatctcttagaataaaatataggcataaatcttcataaccataaattaggcaactgtttcttagatatgacaacaaaagcacaagtagcaaaagaaaaaatagataaattggatttcatcaaagttaaaaactcttgcactcgaaagggcactatcaaaaaagtgaaaagataaatcatagaatggaaaaagatattgcaaatcatatatctgataaggcactagtatcatatacacacatatatataatatataaaatctggatatattattataaaataatccatatatatggatatattatttttacaactcaatacttaaaaattaaaaataattaaaaaggcaacctgaaaatgagtaaaggatttgaatagacattatcttccaagaagatatacaaatggccaactggtatatgaacagatgctcaacattaccagtcatttggtaaatgcaaatctaaaccacaatgaaataccattttatatccactagaaaggcaggcaataacaagcgttggcaaggatgtagagaaatttgaaccctcatacattgatggtgggaatgtgaaatagtacagtgactttggaaatagttttgctattcctgaaaaagttaaacataaagttaccatgctacccaacagatctattcttcagtgtatatccaaaagaaatgaaaacacatccacgcagtaacttgtgtatgaatgtccataacagcattattcaaaatagccaaaatggggaaacaacccatatgctcatcaactgatgaatagataaaatgtgggatagccatacaatagaatattatttagcaataaaaaggaacgaagtacttatgcatgctaccacatgaataaaccttgaaaacattacgctaaatgaaagaagtcagtcacaaaagtcacatattgtgtgattcatttatatgaaatgtccaggataggaaaatttatagagattgaaagcagatttgtggttgggagtgaaggtagtggacaatgtggattgacttgttaatgaatatgggatttcttttagggggaacgaaaatgttctaaaattagattgttccaaaagttgcacaactctgtgaatatattaaacaacattaagttgcacactttacacttcaaatgagtgaattgtatggtatatgaattttatctcaataaacttgtttgaaaaaataaggcagaggtgggaggtggaatcccaacacactaaagaagggttattcctccccagacacttgtcagccttatctctgtaaatttgacgctcatctctcttatgtttttatagtgatgatcacataatgtgcatttgaattttagagttaaaaggaattgaaatcacaagtacttattttacagcaaccattctgagacccaggagaatacgtagggagtagatagttgcagggtggtgagtagcacccacatttctttactctcagcctggtatacagcaggaattctattgtattctttaaaccccttcatcacctagtgatctaggacatcaagaagcatgagggctattcttctaaggctgagcttttcatactgcagttcattgtccattagtggatagagaaatcaatttagagggtatgggccagcattacaatgaaataggatagactagaaattattagaatgcatcataagtgtagagaaaataaatctcttgcaaagttcttgttcatagttatttatgttttgctagatatctctatcatctattagtgtgtgtgtgtttattgggttataatgtaaaatgtattttttactgtgaacatggccaaaaagtttggaaactgctgtgctaaaagatcctgaaggattttatctgtgcttctgagtatgggaagtagtttgccacttttcttttctgagtagtttgtcacttttcttttattctgctctttgctcttgcggcttcggactttcaaatagttataacctgaagtcatagaacatttgggtgaatttactctcattcagctagaaactgttgctcagtaaattgcagcaataatctgatgaatccattttccccatgaagatattcctgtgccagtatacactgcataattccttcccaaccctgtttgaagggcaagaaagcactctgtcttattttttaccattatctataaagagcaaggaccaaagagataaacatgaagaactagtttgagatgcatatcctattttatctttttttttttttttaagacagagtctcgctctgtcacccaggctggagtgcagtggcgcgatctcggttcactgcaagctccgcctcctgggttcacgccattctcctgtctcagcctctccagtagctggtactacaggcgcccgccactgcgcccggctaattttttgtgtttttagtagagacggggtttcaccgtggtctcaatctcctgacctcgtgatccgcccgcctcagcctcccaaagtgctggcattacaggtgtgaaccatcgcgcctggcttcctgttttatctttaatccatgatattgtctttactattcttccttaaaccctgcaaagagaaaggacagtataaatttcaaagtcctataatctttacataactcagagtgtggagacttcagtctgaccttaccagcaagctacctagaaatgtaagcagcagatacagttactttttaaagatgcttggctttgattaataggttgagcttgggatcttttgtggggggaaaaatgatagataattgggatttcacaaatgtgtatgataggccagacatagtggctcatgcctgtcatcccagcactttgggaggccaaggtgggtggatcacttgaggtcaggagttcaagacaagcctggccaacatggtgaaaccctgtctctactaaaaaaatacaaaaattagccaggcatcgtggtgcatgcctgtatttccagcttcttgggaggctgaggtgggaaaatcgcttgaatctgagaggcagagtttgcagtgagctgagatcgcaccactggactccagcctgaacatcacagactgagaatttgtctaaaaaaaaaaaaaaaaaaaaaaccacaaaaccccccaaaaaaccaaacaaatgtgtatgacaatctgcctttcattagagtcacactttcaaatgaaaatcatctgacattcttcatgtgagtggtaaagaaaacttcttgaatttagaagtaaatacaaggaaaatatttaaaaaccacccatatcactctttttgaaaatgttaacattgaagtattgtccctgaacaatgatatatacaaaattccaaggccaagtcaccatgtgcagattttcaaaataaatgtccagaggcctattttatgacactttcgactctcacactcaaaggattatgaaaatgttaggagagtggaggagagataatctgggagggggtggatatctatggaggaaactgttgccgtgaactccttacccttcttcctcgcctcaaaacacatgagggacctctgatgtgtcttagtccatttggtattgctataacagaatacctgagattgggtagtttataaagaaaagacgtttatttagttcacaattctgcgggctgggaacttcaagagcatagcgccacatctggctggcttctggtgagggccacatactggggcaaaacatggtgaagtggagcagtaagtgagcatgtgcagagatcacacgatgagacaggatgcaagagagagagtccaggaagccagattcacttttataacaacccactctcacggtaactaatccgagggcattaatctactcatgaggaatccacccccatgacccaaacacctccactaggcctcatctcccaacactgctgcactggcaatgaaactttaacatgaattttggcaagacaaaccacatccaaaccatagcatatgggaagcctcgggaggggcagaggtgcttgtggccagattttggcttggaaacccaaaggctaagagctggatgcttttttgcttgaggcagagcagggagagtattgccgcattgggaatggcctgtacttagtgtactggggcaagggatgtgtaggtgtttcccacagccaaatatgggggaatccaggtgagtgtcttggttcctgcccgataggtctgctcagagacatcaggagatcccacccaaagcagctgaagtatttgtccagatgcctgttttataatagagtgtattaataggaaatttggggttcagtaaggacagcagaccgggagacaactgctattgagaagatacagttcccagaggaggggcaggtcatgctgtaggggccacatggagaagcatcagggtcggtttggaggcagagggaagggaaggaactgtagacagagcacttccacattaaggaatgggcagggataagcaggtttaggattggctagtttgaatatttcagtgggtgctgggacataggggctacccctagttgtctggtacctggccctggggtgattagggcagggaataccagagtgtgagagctggtagaggaggtggtggggccatgctctggactggtcggtgtgcattccaaaagcagctctctggagggttgtttactatctctgggaattggcttaccctgggaggggcagtccctccagggtcagcaaggccccaagatgtcaaagcatcagaaacagaaaataaaagaaatggtgaatccaaagcccaggggctgaagcagttgtgggctgaggagagagtcacaagcaacagaaatggagaggcttgcatccctgggggacaagggaatggcaggagagaggtgctcagcagacgaccaccaagaggccctagacagcatccttggaagaagagccagtttgagattagcatagggctggtccaagaacaattgtgtggggaaaaactctttcctctaactgtgtttttcctctactctcataccacaacaaccatcaacacagaagaaaacgtctgtgaccaaatgtgtgggggtctcttcccatcaccaagcagcagccaccagccaagtgtcctccaattcaattctgacactgcttacctaaagacagtgccagatcccacaggttgagggctcagtccccaagactgctccctccttccctcaccatcagttgcaagcctgggcctctggaacttctgacgaagcggcttcaggttggggttcccgcaaacctcctttggattcagttaatttgctggagtggctcacagaactcaggagaacaccaaattacatttactggtttattataaaagatgttgcaaagatacagatgaagatacacataagacgagatatgggggaagagactgggagcttccatgccctccctgggccccaccctccaggaacctccccacatgttcagctatctggaagctctctgaaccttgtcctcctgggtttttaaggaagcttcctgacatcagcattccttcctccagggtatagacttgaccctctctggggagagtcttaagacccacaatcacaaaggtgggggaagattagagtcctgccttggggcaggttaaaagagggcaggaaaaggtcagaggcctgtcccaaggcctaacacacccaaccttataacaaaagactgtaacaaggactatgggagttactagccagaaactgtgggcgaaaaccgctatatatcatgataccacaacagttctttcctcttccctcttcttcctcccccaccaagttgaagccagctgtggggaaagaatgcccactcccacccccagcccactcctaccactcacctctccacctttcctgcctactgtgggattttggcctgaatcaggtctgagctggaggacaggagattcgactttaaactggatttctacttactttctgttctcttacctaagagtgtgctgacaaaccctgcaactcctagagttttcatctaggtgcagggagacagtcacccacactacgtgaaattgaaaagggccgtgggagttagttgacagcaggagttgtgcttgttgaatacactaattgtctaacagtcagttgcatctccatgtggcttcatttaccatggcttccttaaagggactccatgattttgatttgtttctagggaattctattatttttaatattctgcttatataaacgtagatttcttaaaaaaccacaaactctcgacattattttcacaaaaaaccatatctttaaatgtatgttataattctttgaccttcagcagagtattattccatccagttagaatttggttatgtggccatgtatctggagcaaaggtaaaaaccaagcagttaggtccccacccccacaacctctgtcaagtggaaaagcgcagctccaaagatgcacacagaaggaatcccataggcccactctcagcctagtctcctcctcccttttttaaaaataattgttttaaatttagttatttgttttgcaagccaattgcatggcaaattagaaacataaaattagaagacagggaaaagattactgaggcgaaacattcatagcaagggagaaaacagacaggcagatatgaaacttaagatgtatagcagcctggggccactgaatgaagggcaaacaagctaacccaattctgaagatactgagggtatcactattagattaagtaaatgggcatttatagtgatagctgtagatcatgaaaaagagttaaattatgtctaatatacctgcttcattgggaaggaaagtataaaatacatttgagtaagagtatgagattaaatagtgaaaatgttaatagttaaaatgagtactagatgaaatagttaactaatagttaatagtttggtggttagagagtcagttatgactccttacaatttcacgtgacagaaaactagacctaaactgtttaaggcaaaaataacttcttggcagtaatagaaaagtccgggcatatttggtttcaggaatagcttgatctaggggcttaaaatatatatattttttttaatctataaactctgctatcttgtatattggcttcgttcttaggcctcagatgatagtaaaatggcagccagcagctcttagacacacattattatggactgaattgtgtccctaaaaattcatatgttgaagccctaacccccagtgtgactgtatttggagtaaggaagtaattaaggtttaatgaggtcataagggtggagccctgatctgataggactcatgtctttataagaagagacacaagatagctcgttcactctctctctctccctctaccatgtgaggacccagtgaaaaggtggccatctacaagccagaaagcaggccctcagcagaaactgaaccagccagcacctggatcttggacttcccagcctccagaactggagaaataaatttctattgtttaagcccaccagtctatggtattttgttatggcagctcaaggtgactaatacgtatccttctaggttcaagactaggaaaagagtatactttccaccaggacacatctggttctgattggaccacatgccagttctggaattagtcctgtggccgtggaattcagtgctctgactggccaaacctgagtcttcccccatatccacagaactagaagtggggtcaacaccatctgaacagcatgaatggagcaagggaagagaggtacccccatggtaaaatcaaggtgccatagccaagacagggtggcaaaactatgtgtcagtaaaatcctcagctctttgagaaaacatagttccccaaagtgaccaatcctaagaaagattgggaaaccctgtgaggtctaactgtagcattcttttccttaagaaactgacatctgacataaaaagctctttaatcagctgcagtacatgaatataatgtcttatctcttattttaaatggttggagccaggactcccttttaaaaataagtgtttatcttcccattgatttttttttaatttttaaaatttttagatgggatctcattatattgcccaggctgatctttaactcctgagctcaagcgattcccccacctctgctcccaaagtgctgggattataggcatgagccaccatgcctggcctcattgatatttttggtagagttgatttggacctctgcttctaaaggtctaccaaactcttctgacctcaccggaagcatgagagggaaaagactatcaagcctctcagagagggactggaggacaccagcaggcatgcttctggccccggtgggtgaaggtctggggtcagcctctgctggattctctgtggtctaaagtcgtggctcaagtgaaggactaatacatacacatccagccttggagaagcctgcccatgcttaagagctgttttctgagctgtgcaagaaattcactgcctcgtgtgctgttgaggtgtaccttgcagtttgttgttttgggtttgaaccattctggtaagagtttgggaggatgcaacattttgtctgtgatggccttccttgtcttgtaactacctttttttctgatagctattgtgatttttttttttagagggaattgattacttgacccactgaaatttacaaccaatcaccatggcccacaatggtgtatcagctgacccagtatattctagccaaaaagtgttcttactgctttgctctttcttgctttaaaaactttcaaaatctggccaggtgtgatggctcatgcctgtgatcccagcactttgggaggccaagtttggtgcaccacctgaggtcaggagttctagaccagcctggccaatgtggtaaaaccccgtctctactaaacaatacaaaaattagctgggcgtggtggcacatgcctgtaatcccagctactcgggaggctgaggcacaagaattgcatgatcccgggaggcagaggttgcagtgagccaagatcgcaccactgcacttcagcctgggcaacagagcgagactccgtctcaaaaaaaaaaaaaaattcaaaatcttctttaaagagaattttaaaacccttctaagctgcttttgccaactgtagtcctggatttatgttttgcattaaattaatttactccagactttcctaagtacaatgcagtatttttttcattttgactttgactcactgaagtgccctatggttttctttcttggggaattaatcaaattatatatatgagatcagatttgagaactgtctatatgtatataaaatatatatttatgtttgtgggttttttgactctatcttcaaccacagaatacaactgttaatttggttatttagggggtttactcttccctctttctcctccccatccctcattcctgccttcgtctcctccttttttccgctattcttcatttttttcttcctcttcctcttcctcttttcctcctttctattcccctttcccctccttttctggagcagcttgctaggcagcagctagttagtactgggaacagagggtaggaaggcaggaatgcggaaacgggtggtcctttcatgacatgaactgaaggcacccggaagtgcagcttcccccaaccccaccgacatgacctgacccagggcccagaaccatccccattagagtctgatgtagtctttgggttgtggtatccggtctttctttagaaaagtcctataaatatgttgtcagtgagagattaacctcctcctccctgttaacatactctcctgagtcagacaccggccggggaggagaagtgccctgctgacgaggaatggtgccagggaaggttttggccgtgatgctcctgggagaagctcccagcctttccagggcaaaaccagagaccactgggctggcagtgggaagcagcctgaagccaagttttgtgcagttttgccttgaactggcccttccttgtaattcatttttgtttaagagaacattgaggtgattggtcagaaaaggctaaggattttctgtagatttaattcatccaaagcccagtgccagagaagtgataagtactgtggaactgatggctggcttttggctttgactgaagatcaaggtgccaatcggcctttctacaagatcatgggcaataagagcatccctcaagcactaaggagctctgtttggccatcatctacaagaatctatatagtgttgcttcgctcatgagcttattactgcaggtgaagaggaaggcattattcatggcaatgtctgtctgatagcaatgttgcaagatacaatgaagtaacacgtatcaagaattatgcagggctggacccgaagaaggatttcaatagttactcatgctctcatataacaaccagctatttggcaggtactgtggaacaggactacatttaatcctggaaggtattcaagagcatgacagacaagcccctgtcctctaggacctttgtgatcattatttcaaagactttttttggtgatccttattttgtattcttcttgagagtaagtttcctaaagcagaaacaatgaggagtagacaagaaataaaatactccggaaactccaagggacctagagcaaaagaaagagcagaattgaaatatttttaaagccttatagtatttccaagagtgagaaaagggctgccaatgctagagttggtgtttgggatttggcagtttttactaatagttggattgaaatgagaagcgtgttgccagattaattcacaattttaaaacactgcaaatgcttttaagttcaagtctttgtttttacctccaaagagtaactgggtcttctcgctccccagacaacccctgtggtcctaaggccagtgtctgtgtcacccacattatgctgtggagctgccaccactgcgctccaggcagctaccctaatgcccgcatggatgttttcctctgcattgactttcctttagggcagaaatagcagaacaagcctgtagtagccagggttctctagagaaacagaaccaatcggaggtgtgtgtgtacgtatggagagagagagagagagatttattttaaggaattggctcatgcgattgcgagggctgacaggtctgaaatccgtaggttggactggcagactgaaggccaagaaaagagttgattctgcagctcaagtccaaagacagtctggaggcagaattcctccctcttcttcaggggacattagcctttttgtcttaagacttttagctgattggatgaggcccacccacatgatggagaataatctgctttattcaaagtctactgatttaaatgttaatctcatctaaaaaacaccttcacagtgacatttaggctggcatttgaccaaacatctgggcatcgtagcctagtcaagttaacatgtaaaattacccaacactagttcttgcctcgccaacttggcactcatatacatttcttgaaacagtacttaatcgtcaataaagagtataacaagacacaattctgactaacatgatacaactatcctgtatacaatcgaaaatacactaaccctttccccagaagaagaaataaagtcctcgggtgatgttcgagcttccccttgatatcctgtaacttcaatactgtggtattaagtcaatacatcttaggttgaatgataaggagatgagagagggaagaaaacaaaagatgacttttatttttagttgacacataataattgtacatatttatggggtacagagtgatattgccatacatggatacagtgtgtaatgatcaagtcagtaattagcttatctatcacctcgaacattcatttctttgttttgtgaacattcaaaatcctctcttctagttttttgaaagtatacactaaattattgttaaccacattcaccctgcagtattagggaacactagaatgtattcttatttagctgtagtttcatatccattaagcaatctctccctgtccccgctcctacacttctgagcctctgttaaacactgtgctgttctctacttctatgaactcaaattctttaagcttctatatatgagtgagaacatgcagaatttatctttctgttcctgacatatttcatttaacataatgtccttcaggctcatccgtgttgccataagtgacaggatttcattcatttttatggttgaatagtattcccctgtgtatatatacctcgttttctttatccattcatctgttgatgggcatttaggttgacttcatatcttgattattgtgaataatgctgcagtgaacatgggggtacaggtctattcacaataacaaagacatggaatcaatctagatgcccatcgacagtgaactggataaaggaaatatggtacttatacaccatggaatagtatgcagccataaaaaagaatgaactcatgtcctttgcagtgacatggatgcagctgaaggccattatcctaagtaaattaacacaggagtagaaaaaccaaataccgtatgttctcacttataagtaggagcttaacattgagtacacatggacataaagatgagaacaaaagacactggaggacactggggacttctagagggaggaggatgagaggtgggtgaaggctgaaaaactacctatcaggtactatgctcagtacctgggcgattttttggtttcatacaccaaacctcagcaacactcagtttacccatataactaacaaacctacacatgtaccctctgaacctaaattaaaagttgaaaaaaaatgttacctgcattttagagcctaaaaacctccatgggggcacaggtgtccctttcatatacaaattcccttttctttggatagatactcagtagtgagatggctagattgtatggtagttctacttttagtttttaaagaaacctccatactgttttccataatcgccgtaccaatttacattcccactaataatgtataatagtttccttttcttcacatcctttccagcatttgctatttttggtctttttgatgatagccattctaacggagatgatatctcattgtgggtttgattttcatttccctgatgattagtgatgttgaacattttttcgtatacttgttggccttttgtatgtcttctttttagaaatgtctatttatatcctttgcccacttttaaatcacattatttgattttttgctgttcagttggaaaacaaagatttttgttttacatacatataacatacgcatatacagaaaaaacatattcataacaaaataggaagaaatactcactacaattacaaatactaatttctgtaacaggtcacatggtcatagctggtataagttgagcatcccaaatacaaaaatccaaaatgctcccgcatccagaactttttgagtgctgacacgatgctcaaaacaaatactcattggaaaattttggattttgaatattcaaatttgagatgcccaatcaggtataatgcaaatattccaaaatctgaaaaaataaaaaatctaaaacatgtttggtcccagcatttcggataagggatactcaaactgtatttgtaactaccttcttctgccacccattccatattccctttgccctcagcaagcacctcatggttctttacctggtgaagtgacacaaatcttcattcttgaagggtctaggacatcagtagtcttgcctgaattgggttgtagttttccattgactttaatcacaagacatggtaatactaagagacaccttaagtcatctcctgtattctagacatattcttccttacctccatttttgaagaacagttcattttccccttggtaattagtggaacacaattgcttctatcttcatctgttgattcagaggaatgaggaaaccatgtagcagtcttaacttccagttcaatagaatgatcgtcacgtctcctggtagaagcatttcttcctctggaactaagacctctcgaccaccagagcagaaggcagctgggattggaagctagttgattactagggtttatagtgagtgatgccactcccatttctacctcttgattcctgaactcgtgaatcttggctatcagagaaaccatatgttgtacaatgattcagagcagatactgctttctggagaaacttgcctcagccccgcaaggtactgccacctagtagttttcacctacagtgaaaactcactgtaactgagttttcaaaaggccattccactgttgtattaagccacctgttcaggatggtggggaaagtggtgagattagtgaattccatgaccatgggctcactgctgcattccatttgttgtgaagcgagttctttgatcagaagcaatactatgtggatactatgacagtaaataaagcattctgtaagtctacaaatgtagttttgacagaagcattgcatgcagagaaggaatttctgtatccaagtaagtgtccattccaataagaacaaaacacttccccttccatgataggacagttcaaagtaattaacctgccaccaggtagccagctgattaccctggagaatggtgccatattgaggacttggtattggtctctgctgctcgcagactgggaactcagctgtggtgagtggaagtacattttgctgagcccagggataaactccatccctgcccccatggctactttgttatgagcccactggacaatgatagaagtggatgggacagaggctgccgggtatccacagaacagatcctcctgtctacttgggaagcattcacctaggacatgtttcttagccatttagagagggttttcactcagacccttccccagatcttcctgtcaccaattttccaatcatgttccttcaaagtccctggccatccagtcaaagaattggccacagcccattaatcaatatgtaatttcacatctggccatttctccttccaagcaaagtgaacaaccagcacactgctcaaagttctccctactgggaggatttcccttcaccactgtccttcaggatgtcccagaaaggcacaaatgtgctgcagctgtccactttcaggtgatgcctccatatcttgcaatacctggtctaaaacaggcctaagttttctctttctttgttaactgatcacaaggaactcaccataatgctgtagatgtggaatgtagcaggagtgtggagtgtggcgttctttgcatagcttacttgtgtagaggctgcttggatccaatcttatgtataccacttccatttgatgacggaatgctgctgtgcttgcccaacttatggcttcgtgggtcagataacacccagttcataatggtcagctcacatcacatagtgacttcatggcccatggttaagccttctgtctctactaagacccagtagaaagtgaaaagctgtttctcaaaaaaaagttatctgcagaggatggcttatatgtagacggtggcaggactttgctccaaaatcctaagggtctgcactgtcgttcacttatgtgggcctgctgaaggctccaaaaagcatccctatctgccactgacacttaaaagcaccattagatctgctcagtcatatgctttaagtggcagaacagcttacacagcagcctggacctgctgcagagccttcccttgttctgggactcacactactggacccttagaaatttaactgaggtagaagactctggatgttttattgcatttaatttttacctcctgacacccaaatgtcttaccaataagtctagagtagttgctacttcttgttcactagctccaattagcataatgtcctcaatgtaatagaccgatgtgatgccttatggaagggaaaggtgatcaagatccctgtgacctaaattatgacacaggaccagagttgatagacccctgatgtaggacagtgatatagtttggatgtttgccccctccaaacctcgtgttgaaatctgatccccaatgttgtaggtggggcctggtgggaggtgtttggatcatggagatggatccttcatgaatggcttagtattgtcctcctgatagtgggtgagatctctctctgagttcacttgagatctggttgtttaaaagtgtgtgatacctccccctaccttgcttctgttcttgctatgtgatgtactggctcccctttaccttctgccatgggttgtaagttccctgagaccctcaccagaagcagatgctggcaccatgcttcctgtacagcttgcaaaactatgccaattaaatttcttttcttcataaattacctagccccaggtatttctttatagcaacataaaaatagcctaatacagacagtgaaagtatattgctggcctggccagttgaaaacaaactgcttgttggtttttactaaaggtgtgaaggaaaaaagcatttgccagactaacagctgcattccaggtgtcaggtgatatgttaatttgctcaagcaatgaagccacatctagtatagcagctgcaattggagttgctacctggttaagtttataataatctactgtcattatccaggatacatctatgttctgtacaggccaaatagatgaatcgaatgggcaagcagtaggaatcaccacccctgcatctttcaagtctttgatggtagccctcatctctgcaattcctgcagaaatgttgtattgcttttggttgtactattttcctaggtagaggcagttctaatggcttccacttggccttttccatcataataacttccactccataggtcagggaaccaatgtgaagattttgtcagttgctgaggatgtatattccagttatgaattccagaactggggaaataactacaggctgagttcaggaacccactgccctcattataagatggacctgagttaaagcttcattgatcacctgacccccataaacccatactctgactagagggccacagtgacattttgggtcttctagaattggtgtcaatttagagctgatgtccactaatagaaagaatagaaagatctgattatttcctttttgccagtgtgtagtcaccttggtaaaaggccataggtccctttggaaaaggctgggagaaagatttaccttataaatgtttggcggtggagtggagttcttccacaatagtacctactctccccttcattcaaagagttctgggtctgtaaaccagctcaggtctggtaattgattgaggggatatgactctatttttatgtttcaagttagacttgttcatttgacctacaactcttccacttctacaaagcaagtcagaatttgctagacttcccagctgtttcacttccaggaacaccatgatcaactagtcagcataggtctctgagtcagactattttgactgctgtttcaactccattgtccattatggtaaccacacccgccttgcttttggtggtttattgccaccacttggctgccaccaacctggggcccaattacccccattgcacttaggttttccaacttgatggcagcagtttccacatccttgacatctattctcacagatattcctcaaattgctgtctgtctgtttaaattggaaaaatcatttagttcttttgaagtgtagcgcaccttctcatgggtcatactttgtacttcacctttcagggcttgctgggatttgagtccagttatcagttgataaggaaagtgggatgggggtgggtcctgaagagaatcagtggggtcttccatgacagctgcctcaggggaggccattacagttttctcgggcaaagcagggttaacctgctcaaacatgggttggggggtgcagttgcttcttctgacaaagaagactcgttggaatttaggggttcagtgtccccatcttcgtcatgatcttcccatatgtccccaaagcaattttcaaagtcctattccttcccaatctatgcccccactttaacagcagatactctgcaaggtttggaatttaacttgcattgcaattcagacctcgcaggatgaagattcttggtttggttttctgcagtctcagctctgaggctgtaggagataaggatttctttctaggaaggcatagaaactttcaggtcatttatgctgcatctgagtgggaattcaaatccctcaactccttttctttcccactttgtccagcccaattaggagcaaccagccaagttcattatgcccattagtttgacggaaatgttctacgttatcaaatacgtggtcacccagaaccttgcctatcataattatttgattaggagtatctaatagtgatatttttgtgtatctctattaccacatcacaccgatgactatcagtgctttattcactattggaactagagtcattagtgcttctaaatctagtcatttagagaaccaattccagaaacccccaaaccaattcagagaatttattcttaaaattctgttcctggctgggcattgtcttatgcctataattccagcactttgggaggctaatgtgggacagtcacttgaggccaggagtttgagaccagcctgggcaacatagtgagaccctacctgtatttatgaatttaaaaaattctggtcctctaagaatacttctcttggtaccaaaatctgtattagtcagggttctctagatagatagataggtacgtagatagagcttatctagttacctatgtacatataatatatattgtgtgagtgtgtgtgtgtgtgtgtgtatgtgtgtgtgtctgtgtgtgtatgtgtgtgtagggatggggagagttttattttaaggacttgattcacacagttgtaggggctggcaagtccaaaatctgcaaggtaggctaacaggttggagatgcagtcaagaggtgattttgcatcttgagtccaaaggcaatctgtaggcagaattccttcttccttggtggacatctgtctttttctcttaaggccttcacctgattggatgaggaccactcacatgatggaagataatctgctttactcaaagtctactgatttaaatgttactctcatctaaaaaataccttcacagcaccatctagactagtgtttgaccatttggcaacatagttagccaagttgacacaaaattaaccactgtagaacccaagaacatttcctcagaattctaccactaggtagagacttaacctctgcagacaggccagctgggactatgggccatgagagaagacaggtggaaatggcagtaggagatctgagtgtttgtccttctgtctgccaatagctaggggagcattagacacgctttatatggagtgggtagtgtcttgtgggggtgctttatgctatgtcagtcattctctagtctttgttctggatttttagatcttagagatcagggaatacagtcaacacccaacacccagtatccatgggggattggttccaggaccatccatgggcaccaaaaggcaaggatactcaagtctctgatataaaatggcacagtatttgcaaataaactacacacatcctcctatataaattaaatttctagattacttataatacataatataatgtaaatgctacataaatagttatattacattattattttatttgtattatttttgttattttttagttgtgtatttttctgaatatttttgatctgtgtttgaatgcatggatccagaacccacagatatggaaggctaactatatgtgtttttgtatttacctccaccgtaacacctagcaagggtgctgctggaacacagtaggccttcaatcaatgtctgctggatggatgactgtaaaataggaaagtgaaatgatagtaaattctctgggtctgcaagtacttgtgtctctctgaacaagtcacatagcctgttgaaactcccaggtaatttgtaagtgagtaaactagccgagttcccctccatcagtgagagtttcttttacgtttctgatgacaacacaggtaaattctgtcgttcaccatcatttactaaaaagcactttcagagaaattcaccatacatgggctgggctgtcacagagaatgaaaataacatggtctcgtccctgtgggggccccatgcgccaaggcttagattccaaggctacctgtaaataaattaccagaactggggctttaccttatgaatcttttctttcctaaggctccaactagcatggaatttttgaaaccttgcaaacaaggttgtatcttttactgtgtacactacactggataaaaatttggaagtcagatatactaattcattgattttcattaattcagtgtgggaaagtgtaaagagcacctccccaagcactgggggacttgggtaattagaataataatgttaataagtgtgaacacttcctgagcatttcggctgtgcgaagcatcgtgctcaatgccttattgctgatgattctctgataacttcataaagtaggtgctattatcagctccagtttacagaagaggaaactgaggcttaaagaagctaagcaactagccgtgattgcagggctgttaagtggcacagctggtactggaatccagatgtgtctgactccaaagactgaagccctttattagagactaatccattgactttaaaaatgccatttaacttctgaacttcaccatgtaataatgggattcaatgagatgctctctctagtttctttcagttcttaagatgtagaactcttcagccggagaagtcagtcaggtcaattccactgctcatccctctccagaagaagggtttttgcaatgcaaatggggacgaccttgtgcaactccagcccatagaagtctagtctcatagagactagtagggacctgatccagtgggaagggggccaagaggagaatgaatggccagcatctgttctctccatccacacgtgtttattcatcacttagccaaagatcatggtaacagcttgggggagggaggaaactaggatgcctttcccatccttttcaatgttgcctgcaccattttttccatgactacttaactacactagacattgagaaaagaggtataaagagaggaggaaagagaagatcagggacagttgtaggctgatctggcctggaatggcttgcacttgatatggaatatcaagtgggatatggaattaaagtggccctccagtgagtcacatcccccatcagttgttccctgcatcctcctcctacaaatactggtttctgtaggtgagcagaatccccaaaaccatcacccagcacctgcaaatcttgctgaatatgaaattcatgacagcaataaaaactagcagttattgagtgctcgctatgataggcattgtcccaagctcttttaagtattatcttatgcaatcctcacaacaagttatcaaataaaaattagtgtcactcccacttaaggaaggagaaactgaggcttagagcagttgagtggcttgtttcaggttcccgatctcataagaagtggagctggaatttgtgtttgggtctttctggctccaccctcatgctctgctccgggacgtggttcttccccctcccatacctgcaacccccgcctaagtctgattgaattctttcatccagcctgctggtgttcagcccttggatcctaccagatgccctgcagctcagtgactggacagtgtgaatgtcggccaggagttacaggacagcggtgtgacaggtgtctctcaggagcttatgatttcccccactgccaaggtaggaaagtcagcagattgctagagggctggttcctctctgaagtgtgtgcagccagcctcccagagaagcctgcaaatcccccacagactcaccactggccacccccacatcctgctttcacagatctagtctgcttggttcctcacctgttcaagtctggtttgaaaacacgtatatcatatatgtaccctcaaaggaatccagaaatgatttttttaactaaaaataatgtaaatttccatgtgctatacatgtgggtttcttggttcacatgtcagttttctgtggatagcattgtggcataggtgactcctttgagttaaaggggccatttgttgtcttctgtcccgaggcatcatgccttctttcgctcccagcttgtggtgctaatgctggcagcactgtaatgtttctaacagatccacttgccagcaggcttagcaggacctttgctgtgtttcgggcctctctccctgccctcctctggccttctgggggaccgtgtcatcgtacttcagcccaagtgttggggaaggcgggtgggatgcactggagtctatgcagtttggagagagtgcactgagggggagatgaaaaccaagcctgcagctgtgggacgtggttggtattcatccctctgttgatatgagagattaaggcttgcccatgtaccatggcagaggggacagaaatgagatgtccacaaatttccctgggctccctggtgtgtgcagccagagagcagaccagtagctcttgtcaatttcggagaactcttgctactgtgaagaggtgtttgtggaaggctgacccagactatccatcaggagaatgtggtttctcagaccccttcctgcgctttgaagacaggactgacttcatttcccagaatcttcctaaccagaatcctctggagaccaggtttccttgagggtggaagttgcagcaggcagtcagaggtgggtgcttgcctttcaaaaggcctgaaggtccctaggatgcgagggcatcctgcatgggtctgctcacctccatgggcctcaggagcagaaggaagtgctgtggctgcctggcagagaagctgagcagccacagtcatcccagggctagatggcaatgtttgtgtcctggagaggaacccgaggttgggcatggaaaacaaacagctggaaatttgtgttgggtattacggaaaaatgcagggaacaggagaacatcagaaaagaaagagagggcagggtggctcatgcttgtaatcccagcactttgggaggctgaggcgggaggattgcttgaggccaggagttggagaccagcctgggcaacataatgagatcctgtctctagaatttttatttatttttgattttattttatttttttttgagacagagtctcgctctgtcccccaggctggagtgcagcggcatgatctcagctcactgcgagctctgcctcacgggttcaagcgattctcctgcctcagcctctcgagtagctgggattacaggcatgtgccaccatgcctagctaattttttgtatttttagtagagatggggtttcaccatgtcagccaggatgatcttgatctcctgacctcgtgatttgcccgccttggcctcccaaagtgctgggattacaggcgtgagccaccactcccagcctctagaaaatattttttaaaataaccgggcatggtggtgcatgcctgtcattccagctcctcagaaggatgaggtgagaggatcacttgagcccaggcattggaggttgcagtgagctatgatcgtgccactgcactccaacctggaagacagagcaagaccctgtctcaaaaaagagagtgagagagagaatgaaaatcatcaaggggaagctgaggcagacagaagcaaacaaagccaatagggttaaggaacaatttataagcaaacaagatcctattatggatttatttaaatgatttgaaaaaccagactcagaacagacttacccagttcaaacactgtgtaattgtaatactgaaacattgcaagatcccaatttattgaagagagattatatttggtttgtagtgttatactaagtcaggaaaacaaaccaattgattttataaataactttagtacgggtgggaacaaggaggtgtgataattaaagatgtacttagaaattctagaacgtcttttaaatgggcaattaaaagtctcttggtacaatattgccctcttctggacaatactaatgatgctcaaaattttagaatctttccctaatctcctccttcatcatcaattagaagtgaactgtcatgagtagacaggatagggatttgttcagtggcaaaagaggtaatttggggattaaggaccataaatgtcattcaagatgcctgactatgaattgcatgcagactttgccacacatctatcgaaaatataaatgtagatacactatttttgaaaacaaaacgtttaaaacttgaaacatcaaaacaaagagaaaaacaaactaccagataatttaaaaatttctgaatcatattcaggttccagcagtgcttgtgacccagctggtaccatcaactccaatttggtaagtagactataaaagggttgcaattctaactatctctattattctcatgcatattaaggactaacagtgtgggcacttccagaaattaaaataagacccaaggctaaattgcttaaagaggtcattgttgtttttcaaagagcatatgtgattttgtgattttttttttcaaaaacaaaagaataagatttagttaaacttgttactctggagtcctagagtttaactcttactgcaggtttgtaggttactcagagggtgttgcctctgtggagccctgcatgtaagtctgacaaacataattaataacattgagaaaatcaatggccaaggacacattaaataaagttggctgtgtacaaaataattacaatttattttatattattccaagcacaataccatggtattctgaacattttttttctttttcttttcttttctttcttttttttttttttttttttgctcttgtcgcccaggccggagtgcagtgccgcgatctcagctcactgcaacctccgcctcctgggtcaagcgattcttgtgcctcagcctccgagtaactgggattacaggcacgccccaccacacctggctaatttttgtatttttagtagagatggggtttcaccatgttggctaggctggtctcgaactcctgacctcaggtgatccacctgcctcagcctcccaaagtgctggggttacaggcgtgagctaccacacccggcctattctgaacaattttctgagataatttagaaattgtctgtcttcttggcctcagagcctagagatgccgacttccaggcacagaatggatggagtgaaagaggttctgccatccttcccataagccttgatgacattgatgcaaggctgtgaatcttgcatattacaaaagcactctcagataaacaattctttactgattttcaacatgttaaatattcagacattttttctatttaaattggtagtctatgctgtaacagtatcaacagacactgacaatgttataaataagagtgatttttaaattttctttctccttattttccagtttctttttaaccacaaatgcggattacatgcataacaaataaatgaataaaaataaacaaaagcaattagcagactgttgaaatcaacccagtattttttccccctggatacacttaattacttttcatgaccaaaatatgtttctgtgacaagtctttgctcacgcacaggtttgaaaacatgtcttaattccaagatgtcaaatgtttgtttgattttcattcaaaggggtattgccaatgcaagcttcatgttgaaggtcctacttgtagccgctgcaaactgttatattggaatctggacaaagaaaaccccagtggatgttcaggtaggtttcttatatgtcataatttactatattataatgttctcttaattttctctgcctcagtgactaaatccacaaaagagctatttgttgaatcacttcaatttgacaagattctatgtaatgttctgatgttttccccccacttttgacagaatttctgtcactttcaaaatcttagcaagggatttctatcctgtttctgtatgtattttgttgtttgagaaggcagctacttgataaatggtttttatgtccttgtttttataatttactttttctggtttaattttaattttatgcttatatcagagccagtataaggacttaaaaacaccgagttaaggatactgaataaccttgaatagagtgtattttcatgcatgcatatcagtaatgacctcggcattggaatcattcaaaaatcccatgatgttgcagcttttgtcatgaagtagccatgaactagctgttactttttgtaaatggatagtgtggattggtctgttctgccaacttcagaaagcagtctaattttaggcctcagcgatgcaaactctcattctgttgaactgcgctggcaaggccaactgcacacgttgtgttgcagctgtgtaatgttcccagagccaggaactgtcttttgtgtctcccttagttcaaggatgctctcttatctccacagaatgcaagtgccataaggcgggaacagtgagtggaactggagagtgtaggcaggtaaagtgggctgagttttcatgtgacaacagcagaatgctacagcaactgcttgtggggtttctgggggcgtgtgttagtacttctgtcattctacagtgcatggtaatcctttccagatcctggctacactgcttcctattatacagtgaggcagttttcaatcttgaagattagtgaattctgtaattatatcaaatgttgtcatctggctcactgttctgcagggagatggtgactgtcactgcaagtcccatgtgggtggcgattcctgcgacacctgtgaagatggatattttgctttggaaaagagcaattactttgggtgtcaaggtaaataagtccattgggccctgagcaaagcacagtgttgatggacaaagatggtctaaataacatttcttctgagtttgtcatcttcacgcagactttctgatggaatggccctgaaacattctgtccagggaatttggccaaacattgattacattgaaactagtaaattgcaagtggggctgtttctacttctcttctaccagcacactgtgggtttaatgataagaaacataactgggatgggagggcatctgttagttttataaataacatcaatatttagtaattttaaagatatattttatattatcaaaaatgctagcatcagatttttagagacagtgttgtgttaaataatgaaattgcaggacaggtgccccgcaaggctactcttgaatctctcgctcggcccctggttatcacatgttctttagaacagcactgtttctgaagcgcgtttactcctgggctgctgttgtctttgcattggacaacagcatttgagctggcttatagtagccgcctccaacttagaagcagacctttggaaagacaccattttaattttgtttttgtttttgttttggttttggttttggtttttgtggttgaatctgatttccaagcgcggacacaccattttggtttgggagtttccaagatttcaaacacttgccagacagatgtggcagaggaaagaaggcaggcactgtgtcactgggatggtcagttttcctttcttgtacagcaggggaggcgctcagtgtggagatggtttaaggtataactgctgctgtttcctggctttcagggtgtcagtgtgacattggtggggcattgtcctccatgtgcagtgggccctcgggagtgtgccagtgccgagagcatgtcgtgggaaaggtgtgccagcggtgagtcttcgggaggcttcttcccatgttcagggtgtgaaagatggtcttagacattcctgcctgtgctacagctctggagaagagagaagcagccctaaagatcgaggtcaggggaagctgtcctatgtcaattgaaatctggacatttgtgtgtgagttgtttaaaacaggagattactttgcccataaagcctgttctactgtgtagaccatgaagtactttcgcttgaaaattcccacaggtacaaaaaccaggtgggcaagacgagagctggaagcatgaagtgggttctcagggctcaacttccatgtgcaagttggagcaggaggagcccacagataggcccgctccagggagagagggaataagagggggtggtgccacacacccagttgcctgggccaataagaaagggaataagagggggcagtgcgacatacccaggtgcttgggtcaataagagaaggcataagagggagtgccaccacacacccaggtgcctgggctaataaggttcagttcctgtttccctcttgggacccaggagtgaggaagtagagaggccaaagttgttccccagggttgcggtgggggtagagggtaagaaaactttggaagtggggaagaagtactttgtctcatgcagaagcaggtgacaatgaactataggagcgagggaatgaggtggagattgagactggggaactataggaactatggtattgttccatctcttaagccattatattttaccatttataaacgttttgaaaccttgatgtttcatccatgatttttcctctgtgaagggaaaaaaagtaacttctgaatctcaggtcccttcactacttgcattagtaacagatttataaagaaattttttatgtcgtggaggtaaattgtatttagcaaggtgattctctcctttccctcaatgtttccaacatttgaattctaaaagtcagagcaggctgggagtgatgtcccagttgggacaattgcttgaggccaggagtttaagaccagcctgagcaacatagtgagacccgatccctataaaaaaaaatacaacaattaggcaggcactgtggcacatgcctgtagtcctagctgctcaggaggctgaggcaggaggatagcttgagcccaggagtttgaggttgcggtgagctatgattgcatcactgcactacagcctgagtgacagagcaagaccttgtctttaataaaaacaaaaaaagtcagagtaacccagccgcactttccctcagttgggggcttggagtaaaagatctgtgaagagggcatgtctgtaggtttgttttcctgaagaccattgagcctccccatgggccaggggagctttgtaaatgcctgcataaaacgttttcctggctcgcgcctgtaatcccagtactttggggggccgaggtgggcggatcacctgaggtcaggagttcaagaccagcctggccaacatggtgatacactgtctctactaaaaatacaaaaaattagccaggcatggtggcgcacacctgtaatcccagctactctggaggctgaggcaggagaattgcttgaacctgggaggcagaggttgcagtgagccaagatagtgcccctgcactccagcctgggtgacagagtgagactccgtcttaaaaaaataaaaaaatgttttccacctgtgtttcatcttgctccaccctggtgttgataaaatgagcttctccgctacttaaccagcaaacattttttcttcttccaactatgtaggtgattgactgattttcagcataaaataatgcaatcaaataggaattaagttacccagcctgaggcaagaatattaactttttacatgatacatgcacacatacatatatcttcaagtttagagcgtgtccttggatttagtggtaaattataactgaaataaaggctagcaaaccaacagtgtggatgccggagcaccttgtctccaacatgacaatcttgcatccttttgtactaaattcccccacatgtttgctctggttttatcagagaatttttaggttttctgacaagtgtagaaagaattcacgtttgctttattttctgaataattcttgtggtgataaatgtaatatatgtccagtgaacaaattttaataaattcatcaaagtaaaaaggcaaagaaaaatcttcatttctctacccagagataacccctttttaatatttttggtgtattttttctagaccttgtctatgaattaaaaattagcattctattttttcatataattcacattcattacttcacatcatattgtaaatatttcctattatcattagccttcacattttaaatggttatgtatttttttttataatttatctcataattgtacacttatgttgtttccaggtcttcactgttttaaacattcttttatgttaattctttgactatctacaaaatctttctttagaacagattcctggaagtagaattactgggtcaatatgtgtgaacatttttaaggatctttgtaaattgcttccagaaaagttgtaagcattcctaattctatttgcagtataggagcatggccttttatttccttaaacaaattcatctttatggcattaatcccactaactgctattagcttgtgactggattggcgaagtgtctttttttttttttgagaactttaagtagattgttaaatgccacacaatgttggaatattttggatacttctctgtgcctaccacagctgagctcttgaaaagaattcattaataggcatatagtttaagagaaaacaaggcatagaagagtcattctaatgattaaaaaataacatatcaagaaaatatatctaacttgtaaatttagcatatgaaatattttatgtcatgttcatcattatacctatggtccttagcaagagtgcctggcacatagacattaatatttatgtaatgagtgaatgaatatataaatgaatgagtgattaaataaataaacagtaaataacctaatctgactttgctaaattgttggcaactatttagaacatactaaaggatgctaccactatggcttgtgctaaacgattttctcatcttaatgcttggaattagtaggcgttgagtgtgttttatgtgaatgtttatgtgaattaaagcaataatttggagaaagagcagaagatctttctcatttgtcctttatttaatgtactctgtcaatgtggtggagttctttcatagtaactattgtgattaaaagatgttcagatgatctatggacctaacctcctgtatgtgtttactttttaattatgaaaggcctgaaaacaactactatttcccagatttgcatcatatgaagtatgagattgaagacggcagcacacctaatgggagagaccttcgatttggatttgatccgctggcatttcctgagtttagctggagaggatatgcccaaatgacctcagtacaggtacgcaacccgaagagagcagcttcatggctgagtagctcagatacttccccacaccagtctcagggagccccctgaaaggtgacctgtccccagaactgattccacgattctttttctctatattatgggttggcattggagtttaggttaaacctggggtttggggtagggctgtatattaactgataagcatatgtgtggatttcatagttcattgttactttaatttgattaccaaatcagaaaattaagagattaaagaaaaatagtgtttatctctggagactttttatagaagggggaagtttcctaaatgacgttaggctgtactagaatgtgagggacagttttctttaaagccatttgtggaaaacaaaaatgagttggcttaagtaattccagtaaagctagtgttcctaatttttggctgatgctttttttaaactttgaattgctatgtacgtggaaactaagataaataatgaatgtttgttagttaagtgctatttcatttttcttttccatatttctctttccttcattcttctctactgcatccatctatcttggctttgtattagaatgagtaggggaatttatacattctttgtttacctttagaacttatacgtcttgctacttataactaaaaaattctgtatagccattgagtagctttgtcctcagaatttgtctttgagttggtttcttcaagctgtttctcagtggagaaattcagaatatgagaggtaaattaacgatcatggtaacacagtctttttcattagcgcatccaagactgctgcttgctgttgctaccccagtcagcctgtagagaagctggaacagggccacagtactctcagaccccttcccctcattgattctaatgctgttttttacctggccaaagtcccccatccaagcggcctttctgaaatggtacctaggatcttaagacacttcactctttgcccccactccccaaatacagctatttaatttctttagttccctgacattacttcactattcagaaaacaagcagtaaattccattgtgtcataataagatgtgaatgactgacaacccaatcaaagggtataccttctcacaggtgcttacagtttcacacaatagctggtggacacaaaggaattcatctctaatgacgcattttctgataaagttattttggtcagaggaccttgatggtgtccccagcatcaccacttactttactctgctcctaatagatttttgcatatttgttttccatctgaaactaacacttaaagatgaattcagacgaattgtgaggatcagcaggagttcctcagtgtgggtcacctgtagctcctgctttcagagcaagtgattctgcacaaagtcagtctttattgtcaccaatatctcgcttaaaaaaatatccccttccttttaaacaaagaagttgggggaaatgctaaaagaaccactgatttgggaatttccaagtttcatgaagtttccttgggccacagcccaatctggacatgcagtcagtggttcagaattaaaatagtctactctttccttcaagggtccaggctccacaatgtttacagaatattgtgtgagcccaggccctggggaccaacagaacccctcctctaggttgaaaagccatcatttctttgcataaggaattgagataaaacatcatacaacttaataggcatattttagttacacccagatgttaccactattgtatttggagtctttaacctttccttggccaccgttggtttctgtgaccatttagactttatgtatgtgaagcggactctgaagcagtctctctttggtggtgtgaaataataccctctcctttccttctcttctgcctttttatttttcctagccagtggtggttgctccgtcactgtggctttcttaaactagcccatctaatactccactctgtctgcctgattacaaaaaggtcaaaagaggatctcagttgctgagggagtgcgttttcactgtaattttgattgtaagtgattttaattcattgttaggtttgcctatttccatctttcacaagttactcggtgctcgttgactgagtgtgagtgtgtatgtgtgtgtatgtgtgtacattacaagtccagtagtgacacttgaatagaataaagtcactgtttggctagcatgtcttttaaccatttttttctatgctttatggcgtttcggtatttttcagaatgatgtaagaataacattgaatgtagggaagtcaagtggctccttgtttcgtgttattctgagatacgttaaccctggaactgaagcagtatctggccatataactatttatccatcctggggtaaggcacgtaggtaaaatgtcaagcctcttttcaattaagaaataaatagtgaaacactttctctgattttcacaaagttgatcacccttagaaaatgtcaagcctggctcatggtctggttagacggttctctaggagccctgtcgtttgttaccttgcattctctaaacaatcacttaagttttgctactgaatttgtccttaactgtcattttaaaaatcgatataacaacctatgtaccttggctgaaccccatgggttatgatgtcttcactgagcagagctcatttataactcattcacagtgacgagggtgtcacttttttggtgttatttgagagattttggcccgctgccctaaattcttccattgtttcaaaccaaccaaatagtcagaggagaaatgggtgaggatgggaatttttcctatgaatgctgtaaagcatgaagcccaaatgagttccaggagggagctgcaaacctgactcagggatgaggaattcctgagggcagagggacaagagaagagagcacagcctcgccacaggcagagagaaggcccgcaggtctgttcttcaaggtattagggcttctacctgtcctggaaacagattccaagaagcatttggaattttacaaggacacaaaatggcaccaatggaaatctaatttaggatcaaaatgtacgccatctttgttaagcatccacggttcattcagaatgggggaagaaatgatgtcatttccgagttgtgtcaacccaacttgcgtggctggaggttgattaacccattgaatgaactagcaggcttacttcatcattcacagagtaatttagcacccattgcctcacatcataagaacttggcaaactgaggagagttgaagagaaaacagagctgagaggtttagtaaattgccagccacagctggatgtttgtagacaaagtcttcagattccaaactcttaacaggcccctctgcctcctgcgtgacaataacagcagcagtttgttctctgttaactcaaatagttggaatacattttgcttcgtttccttgtcctccgggacacctttcccctaagtctgagttgggagccctagttatgttatgtcccatggtaactggtgcctcctcccaaataccactgtccaaactgtaccacattttcctgtcttctagtccttattcctctctggtcctcaccagcagggagcaaaggccatgcttactgtgtttactgccttgtcaccagaacttagttccaagcctggcacatagtaggcccccatcaatgtatgtagaacaagagtgaacccaaagatttggagaagataattctttgaaagaaaaagtctcaattgaacttagatgcaatagtttatttctttctgaacctcttgtagaaggtcctctctttgtttaatgcagaagaaaacatattttttcctgaaaacaaacaaacggaagtgtaaaactttttcttatgcatgttcattaataaaaattaaaacttaaaaatcacatatgctgtagtcccagctacttgggaggctgaagtgggaggattgctggagctcaggagtttgaggctgtcatgagctatgatggcatctgtgaataaccactgcactccagcctgggcaacatagtgggaccctggctttaaaaaaaactcacatataaacaagaaaggaaaaaataatttagtagctaatgtaatatattgaatacttactatatgcaaggcactttcctaaactgtttacaagtattaatatacttatttaataagttaaacaattattcataatcccagtgtagatagccattgctgatgtcttatcagtatctttctagcctattttatacatatgtatttgcatagtacaatttttaaagataagatcagtaaatctgatcagtacatatcatcttaaactttttgagatgtaaactgaatgttcaaaactgaatatctaaaatcataacactgactgatagaaaaatgccttaagcagttctttgtatttctgataggtgctgctcaaagcaaagagatcatcttcctgccgagtaaggagccagcctttgtcactgtccctggaaatggttttgcagacccattttcaatcacaccaggaatatgggttgcttgtattaaggcagaaggagtccttctggtaagacttagttctgaatggagagctcctgcgggattcttcctacctcagaagtggttccatccaagactacaatccacagcgaccataaaatatcacaatcattggtggttttagacacaggaacaattcagccccaacctaaggaaactgtggtgacattcaccctcaaatgacataggaatcaacttgaagtatcttttgtatcctttcagctagcttctcttggacaaaaaaaataaaagataaaaaaggtctcctaaagactcttaattatcagaacaaatgcgaagccttcatgagtatgtggcttcacccttccaaagcttgtatgggattttccagcatgagtcagaagtatagactttagcactcattgcctcacatcataagaactagcaacttcacctggttattgtctacactgtctggagattgtgtagaaccaaggaagaataacctagaagacaagcagatatggatttcagtaaagttcttgggggtggaaagagaagcaagaggctacaggagccactgcttctccatgacactctttctgctttcttctgtgttaaacctaaagcaggtttattcccaccaaacagattgcctacaacagagaactctttgttcaggaaaggctttgtctgcaaacacctaatagaatagccagagaagccatggggagttggaaggatgaaacctgttctctgagacagccctctttgctatgtgctttaaggcctgctttgcttcatggcaaggtcttttcaaaatagagtccttgggaaaagcttgatttcatgctctcaagtggaaaacataaagcttttccttcaggcacaaccctgtttattggccatgttagcaaatcttaggaaagtcgcttaattccaatcctgtctcttccagtcctgccagttgcttcttccatacaacagggacaatacttatcttaataggtccttccaaattgggatcttacaaggataacatgagggattgttctttccattcaagacaacaaaggaacatcagaaggtctctgctcttcttgcatcttcttagtaggaagctttattgcttaaaaaaaaaaaagttcaagaatgtttcacagatggtagaaatgaggcagaggaaaattccattgatactagtaacgggtacaaagttggactcacggaaagtagaagttcattataaaagttactgtttaggcatggaagatgcctaatgacattatcattaggcatcataagggtgcctatgatcaacctttactattctattatctgtgagactataaagtcatgaggagagaggagacatggtcccaaactcagcaaacttactagtagaacagtaacccttttaaaatttaaacctactgagtcccctcagccacaatctcttacttttcccctcctatacatttctgtctgaggagagaaaaagctttgtggtctgtgtatgagctctttgccctcccctcttccctctgcagatatgtgctgctgtcaggacggctaggggctgtcaatcattcacctcccagaagcctgcagctctgctctttcctgaagagctgcttagctgaatttacgttgtgggctttgtttggcacactcagtggaacatgttcttcctctcgtttcttgggacaggcagtaggccagttccattctgtgaatcaccaagatcacaaggcattgctttttataccgtgccagttgagcgttactcgggtgtgggagtagaaagtgatccacattcagtgttctgtactgctgaaggcaaccagcatttccacagaacatttcatcagttgacaatttattatctttgttaatttgtgaatttataaacaaccaaggagagacagtaaaatctctcttgaaacttgaagaataaaactgttcacactgacaagtttctctctgatacataaagaatctttgatgagtggttctttgtgtttcggtgagtcgggatgaagaacaaagcagttgatatggagagtttaactagcgacttcacctggttattattgatttaactagtatgtttgattattttctatccaaagtagggctaccatcaaaatgaatgattctccttttggtctttattttctaggattacctggtgctgctccccagggactactatgaagcctctgtactgcagctgccagtcacagaaccatgtgcctacgcaggacctccccaagaaaagtcagtgtggggcagaaggtgcagccgcatcattggggtcctctaaattaggagcctttaatgcaagctttcatgaggtgtctcaggatcacaacgacagcatgatgctctggataattagttgttatcttcctctatgtcttacttgtgttcttcaagtaagattcacaaagcactttgcacaccatagctggcttaggagtggctaccaccctccagcatgtgggaatgttgatgcatgcccaagtcaatgccctcaaggtcagtcatacatctggtgggaggaagagcttaaaatagaagccaggtttgtggacctttgtttcttctcttccccatgcagatgaaaatttattgcttaattcttgtagcagacacttaataagagtttattgaaggatgatgaatgaatgagtgaactgaatgactgagagtctttggggatgtactttgatattccgtttgatgttctcagttgtaactattgattccattgttgttgctgttgttgaagttgcttactctaccagcatttgccagtgaccagattcccctgtaccctggcttgtgaggccagacacttcctgcttgatggggagccaagacccgtggcagtgaggcagcccacacctgcacaccctgtcatggtggacctcagcgggagagaggtgggccagccttttatttattatcaaagttattactacctccccatctgtatctgctaaaaatacttggccacagttgcttctcaaattcaggggaacctggaagaatttctcagaggtgtttatcaacatttgctgaactatctgatttagggtggggctggatggtacgctacatggagccatgttcaggttgttctttgagcactttctagacatggcaggggatgtgggcatctatagaatcctttctttttggttatctggacttagaagggggcatcctgttctacatgattcagggcaagatttctcttaaaagacagatgagactcaatctagtaagcgtccagaaatgacacagcttaccctaaaaggataccacactcactgactgttcaaccccttaggctaagcaatttgtagcagctgaattccttgagctcagaatccggaacttctacatcccctggcacctacctcatggcttggaggacaggttactacaggtcttggtattacttttcttccaggagttcttcgaacttcagaaccaaatttaagatcatactgatttcagattcgagttagagctataggatatcaaccataacaataagaatacacaacacttcaaaatgaagacactgaaagacttcctccactatatttttattctttgctctctgtaacattctctgttttgtccttttgaggaaaatattcatttgggggattaaatttgtgggatgaaaatatatgtggagttaattgtaactgaacttttagatgtgtacatttttgtaaactacatttctaacattttgaaggtagcagttaaaggtttttaagtatatttcttaagtaaagtcttcattttatttgaattttcatgctacgaaataatatttacttgtaacaagtaaaacaatatagatatgcataaaaaacctaaatgatcttccctctacttcattctaatactaagtttgctgtatccctccctacacatgctatgtgtgtatacacacatacacacatacatgtatataggtgtacatacatacatatatacataaaatgcacatacacgtacatatacaggtatatgtatgtgtgtgtgtatttgtgtgtgtgtgttccctagacaacaagaggtaccgttgagaaggggcaaccaccaggaagtgatgctgatgactcatctaggaggttctaacctctgatttaacccagagctatagcacagagctagtcagcaggacctcaaggctcttttacaatacggaaatattttatttcactatctctggtctagaaattatccagcttattgattcagtttaatttatacttttaaaacttttcaattggctctttatcatatttattttttcttgtcttttctgccagtttttgtttcaaaacttcatgtacttttaagtggaagttacttcttcatttagcttttttagtatcctaaaggccttggagccaggtgtatttcagaattcaaaatttttaagatttgaaaaaagataacatctccagtgaggtctgggataataccctataatcaaacaggttaatatttctccagtgaaaagcatgaataggcacacctagggagacactaactgactatatacatagacttatatcagtttagttcagactttgccagcaaatgattattggttaggttaggtttgccaccaaaacagttacaaaacctatttccttttcagagtttggggatttcagatcatgggccagtatatttaaagtctttctcagactattccataaaattcacctcatctgaagtgaactcatctctgattattttgttacctgtctttcttaatattcaatttatgtgttttgaattttgtttacaggcatattggcttattttgaatgagaggtttttatcctctccttctttcgcatctgtttcagcctgctaattttgcattgtcttagctgtccactggatccttagcccaggagcaggcattacagtgtgccttctctattgttatgacactgaagataggagattcagacattgaccccatgaatggcatagctcagttcttggtcatgaggccacatatttgatttttggttcccaaattccatagcttcttttaaaaatttatttagttttatatatttaggggtacaagtacaagtttcttatatgcatatataacatagtggtgaagtctgggcttctagtgtacccatcacccaaatagtgaacattgtacctaataggtactttttcaacaccccctcccatccctccacttttcatagtctccagtgtctgttattacactctgtatgtccatatgtacccattgcttagctaccatttataagtgagaacatgcagtatttgaccttcacacagcttcttataaatccataacccaggaggcagattggaagcaatttttagcttctttttaaatttgaacatccttgtcttcaaaaaatgtgcctcgatctggccgctgtctcctatggcacatgttttattctcttaactctgcatgagctaaactgctgaccaaaataatctgcttccagacctagaggacaacaggcttgtgacttcagtcctggtgccattttgggtttttctttaacttatgttttatcacctattacttttgattctaaatatatctttttgttgttcttttaaaacgttttatccagagttggtctctcttggagcaggagtatagtgaatgtgaattctctgtgccatctgaaccagaagtcacccatctttaaaaaatgctaacctgtttttattaaaatcctcctctctctccctcagctcagccactacaccatactcctccccttcacaacaaaactcctccaaaatattgtctacactctgtgtttctaattctttatgccctactcacacctcaacccacttcagtctggctttcacctcccactccattaaatttattttgccaggtttccgatgagatctttgtcactaaatccagtggatatgtttcagtcctcatcggtttaacttctcggcagctttcgatgcctgatggacactccctgaattctcaaactctctcttgtttttcataatttaagagctgtcttaataatttaaaaattaacgacaacctgattctctttctgcctctctcaccgcttcctcaaaatatcatttgcaggctcatcctcctctgtctagccattaagtgttagaatttgtcaatgctcagtcctaggccttattactctatgttctgtctcgaggagtctgatccatggcaattgtatcagacccacctccacacagatacctcccatattgttatgcccagtcatacctctgcttttatatgcagaccagcaagtctaccttccttcctgacattacctctttgatgtttcaaagcaacctcaaactccatttcggtattccctacctaaattaatgctgctaccatccatctaattgcataagccaaaattcttagggtcatccatgacttctccaattctttcccgcacccaaactaatctatctgtgagtgtacatcccgaacttttcttggcattctccttccatctcccttgtccaaaatacaatcatttttgtgagaatctctgtagaagcctcctaactagctgacccacgtctgctctgcccattgcacctcttgatcttttctccagactatagccagcactcacattctgatgggaatatttgatcaacacttactgctcttaggatagagacaaagattttaacatggcttataaaactgccctttctacttcccaattttattatactccctcttgctctctgtttctctgctcctctgacctaccttcagtctcttgggcttgcattttatgggaccctacagcattctatgttgtatgtagcctcctactgcaagccgttccctctacccaaacactcttctctcccctatggcctggttgtcttctccttgtcctccacactcaactaagttgctgttcttcaaggaagccttccgctctccctcatctcctcgactagctcaggcccctgtcttacacctctgcagaacattattcacatgtagttttatgctgtgtttgtctagttatctaattacttgattcaagtctgtctgagggtatgtctgtcttgcttcccattgtatacctatcacctcgctggtggactggcatagcataggtattcagtaatatttgctgaccaaatcatttgaatcctcattttgacatcagacatattagttatcccttttagtttgtataggcaacagatttgataaacccactttccatgtatttatcctaaaacactaataactagtggaggtcagttctgtgccatagaaccagaaatattcctccagtttgacactgattccattaaagttcacctttttaaagataaataacacacataaataatcataacagcaagcagtaaagtttctgtgtgccatcttttatgtcttttatctgagtttctcaaacctgactttgcccatcaaatgtaccttaaactcttcaaacaagtcttccaacaggtaatccatataatttagagtggaaagagtagtagaaatttataatagagtgctagatagaacttgctgccagtaataacttctgggcgaaaacctggtacatcactgacctgtgagtgttttgtggtggggtaatgacagtcaggcccttgtttggagatgcccaggggagaaatgctggcagtaacctcgccacacggagcagtggcagagccatatttccctctagaacatggagtcaacattggtatggctgatccacattctttcccagagggaaatctttctgtcatttaagtgacagaaaaaaaaatcactgtggaaaatagcagttacgtggttcagagcctttcagaaggaataccaaatgtgaatttcctaaggcagggagagggaggaccattttaattaagtgtggtaaatcttgcctgggcctgagcttgcaggcggaggtgggttacactgctgaggaataaagttctaatattggcccaggcattaagtatgtgtacacactttgacccagcaattccacttctaggaatcttacagaaatactagcattaggatatatgcatgatgattgtataccattataggttgtagggaaaattaaagacaacctgtgtccctcaataacggatttgttaaatagttttatattcataccacacaatggtaggcagctgttcaaaaaatgaagtatatttgcatgtaagtgtatttgcatgtatatatttttgcaataaagacatgtaaaataccattgagtaaaaaaagcaagtcatagtaaaaagcaataatcaaattataataattaatatttacatagtgttttttatatgtcagatatacttctgagagctctgtatgtattcacttaatcctcagaacaatcttaagaggggggtactattgttatctgtattttactaaggaggacaccgaggcatacagatgttaagtaacttgtgcaagatcacacagctggaggctgtctgattccagaccccaagctcctaaccagtaggtgatatcaggggaggacacactttttctgtaaagggacagatagtaaatatttttggttttgcaggccctgtggtctctgtcatcatagcacaaagacatcccgaattgtctactatgatcacagtttttcttaatgaaacaaaacgtgtgtgcatatttgggcatagaaaatggtttggtatgaaaatcattaacagtccttattaacactccttatcccaggagcgagatgtgtgtgtgttttacattatttcccttgatacaatttaaaacttattaaaaaaaaaacaattaaagagcccaaaggcacatttccattccccttattcctcatcagtacttaatttttacttcaagttttagaatgtcttttaccttgagaaacaagcagcaaaaacactcctgggtagaaatagtagaagtttctctaagtagggctgccagatttagaaaacgaaaatacgggatgccccattaaattgtccaaataaacaataaataattgtttgttatttatttccatttaaaatttaacagggcaccatgtgttttatctggcatctcaacctgtaggaccatattccttactgggatgacatataaaaatacttccagggtgtcttctgggctctattttcaccattgctgatgcaagtgtggcctgtacatgtcacagctggatcacagtctgtctgcttggcctctgtgacaggtggaattgcatctgcggctgcgcatcccacaggttggccactacgtggttgtggtcgagtattccacggaggcagctcagctgtttgtggttgatgtgaatgtgaagagctccgggtctgttctggcaggccaggtgaacatttacagctgcaactacaggtactcagccccaccaagggaattcctctgtaaaggaacaattaggaaatctgccttaggaactttggctgttacttgcattgggaggttattttctttttgaggcagctcttgaaaacaagcaggtgactagttgtgtggcccaacgtcatcaccagtgtgggtattgggagtcctctctatgggcagtgtaaaaatgtggcattttcttaaaaagctgtatgctgtacttagcaatttggttcagattcacatggcacagcacaacctttttatttgattctctatcactcaggtgcgatgcaatgaactcactgctctcacctcaaaggctgtgtcaagtacctgggtgcatagcacaaggaaaaagactcattctcagtaatgttagggggtgcacacctacctttgcaacacaccttcagaactggggataattaatgtttgatgattgtcaagtggaaaaaaaaattaacaaaggacttcaaaatttgccctgatgaagttcttctcttccaagagcactaactgacaagggcttattaaaaatggttttgtttgcataatatttcaagatgtgtgcaaatgttcagagcatgctgtaattaaagaatcagcacaaggggtgtttccacatgaaattaattgtatactaaatgggactggaagtcagagttccttgaaacagcagatggagcactgcagtaaacccatccagttcttggccatggccttgaacattgtattactactactttcatgttgctttttgtcaaacccaagatgacctgaagcaatggacatcttccctgttgtgaaaatgaaaacaaataaacaaataaacaaaaacttatccaaagagttacttttagtagcttagaatggaaacttttatgagaatcgatgaaatggctattgaatcaacatcatgccctcagtaacgctaaacaagcagctgcgaagtctttgtctttgaatgatgatagaaccaaagaaggtaattgtatttggagttttaacagaagcacaaaatgagcctaaaagagttctccagggatgttctgtcattatctgaagatatgagcggtatctgtctatagatgaaatcagcaaccactggaatgtccactcccagatgggtgggttgccacctcacctgaggcctggagactgttagccgcagggcctggaccagggcttctccatacccatttgtccacgcccacccaccagttcggctctccagctccttccacctccagatcccatggcttgactactgttgctcaggatacaaagtggagatggctaagggggcaggaggaactattcataacaaccctggtgactctgaatcatctcagaagagctctgagaatatctatgccaaggagaggagtggtttcaaaaccaaagaaagaaaggacaccctttctgggcaccatgggtgttgtttcatgacctaagtctgaatggagttattgagagtgaactgcatgtcagtctgcagatcattttggctctgaacatgacaacaccaaagtcctgctttaggagtttctatccttagaaacacaggacagcatggtttcagtctaggaaacactttcattgtgtttaatccctccaaggagtgtcccgttctattttttcacgtggctaaaatacttcctctttctcttccttgcctgtcatgtggatgagtgaaaatcaacaggctacaagtatgggagtccaaaaaatatggcgcaactggaaaatatttgacccatgaaaacctatgttaaatgacaggccctttcagtgttgcagcatcttctgctgaggtttcaacttttcccagcatttctcaagtgagttctaacgatgttaaaaaaaaaatcccagcagaatagcagtggtgctaatagaaaaccacttttcaaagtagtgctgtgataaatctaatctgctctccataagagagatgatcattagtgattagatcaatctggttattactgttaggctatttcttaggaggaatttaatataggataaggataaaactaagtaaattacttagtatatttaaccctaggattatgcctaaatccaaaagaatgtgttttaatggatacacacacacacacacacacacacacacacacacactcacataggggagtgagaaagaaaacaacagtttattaagtttctaatatacaatacacactgggcttggctttttatataacttatctcattttaatcctcaccaaaaagtcattgcctaaattatttcaaatatttctcagaaatagtccttttgttttaatataacagtagtttcaaattatatttacagacagaaaatttgcaacagagtatgaagtcagaaacattactcaaaaagtacctcctctaagggttttaacgttagagttatttggttcaaaactgtgagcttttaaatgcccctgaactctgtatctcacttgatgtgatggagggaagagataccacaggtagaaatgaagaaggaagaaggaggagaaccagactgagtttcagaggcaaactcagggtctttccatgctggaggaaggccagcatgctcactgtcttggcgtgggatggtggctgtgaggctagcgggtgactttaattgtgaatagccccgagaatgttggctgtgtcttagagatctgcagttactgaccctggggccctttctctcgaggactaaacctagtacttcatcaagccaggcagaaaaactgaatggggcctttagccctgagaggtacaacactggccacggcaggaaggttattttccccatagagactgcgagctgcatccttcttcaactcatcatgcaggaaaattcactataattcattcagttataaacaggtgaaaccaaagagccatcagccaacccagaaggatgtgcagaatgagggagatgccgggagtcaggctaagaaaactctgttttctcttgcagtgttctctgccggagtgctgtgattgatcacatgagccgcatcgccatgtatgagctattggcagatgcagacattcagctcaagggacacatggcccgattccttctggtatgcttctgttttgcccattgaattttagaagcattttgctgatatctatattttttgaagcttattaaaattttggctggggttgtattactcctataatctgtgaagaattgccagtttaatgtttattcttcccatctagaacctgacttgcctcttcatttgtttgagcattttttgatatggcctaataaaatttagtcatatttaagcacctctcacaaaatcccgtttcattagtttttattcatttctactattataaagaaaatgtcttctgttattatatttcctagtttaccattattgccagagtttagaaatcccattgcttattgtttattttcttttccatcttactattttattatctctattagcttcttggtaaattttatcaaaattttaaagcttataattacctagtttaaaaaaaactaaaaaactatttcaaaaagaatatcattcagttaatcagatatatatatatatatatatatatgttattaagagttaaaatatcaagtgtggcagactaaataatcttcatgcccacccttgtaatgtcatgacttgaacattgagtattctgataaacagagccagtgggatctcactagaaaggaggtggccagatttacaatgaatatcacagggaatttaagattctctaagtgtgaagcaacttcctgttactgctgatactacgcatgcatcacaccctgggaaatgccaggccagcctgtactaatgtgttttaaatatttgtgcctgatagtattaaaaacttggagcctgctcttaagaagtagctggaattcagtttttaaaaaattataattataaaattatgactccttcttaaaacataacaatctgagggaatctaacctcttcatctttagaaattataatggagctgaatcttcatcatttaagggtaagttttccctttttgaagtagtcaaatgccattcagagtcaaggctggctagaacataagctctatgaaggcaggggtgttgtccatcttggacttgtaagaccccctagtctcagtggtattcaccaaaaatgtttgttgttgttactgaatagctttgcaatcaagctggtaatacagttttgatttaaaatgaagtatattgataaattaatgactaagtttttttgtgtgactcaaaaactagctctggagacagttccttcaacaaaggccaaattagcctgagatgggagtcattctttattaagaagggttatttctagcagtggcagccctcactttgaaaagcaggctctctggcccacaccacatcccctatcttcctcccaacgggcctgaaaagccaggattggcgcaagacaagacagaaaaaaacaggcactggaagtcactgaaaagagtagtttctgagcttccttatggctttgttctcagttctatttatgtgagtatttcagcagtaattcagtcagtaattctataaaacaataaaaaggatttgttgcacataatgatgcctgaggacatgccatcctgcaatatttactactttaaaataacgattagaattattatggataaatcctttacttaatagcttttttaaaagggtgtttttggccataccgtttgttttgctggtaactgcaatgtgcctttgtgcattgtatttgctcactagcatcaagtttgtatcatacctattgaagaattctcagctgagtatgtgagaccacaagtccactgcattgccagttatgggcgatttgtcaatcaaaggtaatgtgtttccttcctgtctccccgttcatgttctgagtgatactgggatgagtgtaaggctgaaactttatactcaacgtcagaaatgatcataagccaaggtgctaaagtctggtggtggatttaaaacagaaagaaaaaccagctaaataatttaccccagcagtttttccagaattccgtaatatcaggaagctgacccaggaacaaccagggaaatggttaagcctacccctggagggcaggaacgctgagttctattctgagccctcgaaaagactcgttttgttccaatcttttaatctttctgtctgagactcttcatttagaaaaccatgaaaataatgacctatctcataactatgtgatgagaatcagctaactaatgcttattggggttttggtagggttgttttgctgtagattcaaaaacagcttatgggcatggtcatgaaatctggtgtgcatagttaggactgtaggaactaccaacacaatgtgattctggttgtgcgtaaaagagacgatgtatattttttctttcttatatagtgttctgtcaatatttatgtttagaggtgaataatgttttattgtattgatctcattttaacaattaattttagttttggaaagggaagtttccataagtttctatctaacttactttacttcaaaattaagattctctctgtttcaactagttcaatggaacaggtggctggaatacacttggcatgagtatcattatataaagatccctagagttctgtgcttcccccagcactggatccttttgatgcccatgcagtcctatgctccaagtctgtctcttcactgatggtcagttctgtagctttgggttcttttaaaaatcagatttttaaatattctatttttcagtgccacctgtgtctccttggcccatgaaactcctccaacagcattaattttggatgttctaagtggcaggcctttccctcacctgccccagcagtcgtcaccttctgttgatgttcttcctggggtcaccttgaaggcaccgcaggtagtgtgctgtttctaaaccagtggttctcaaagtatgacctctgaagcagcagcatccacatcacttggaaacttgtcagcaatgcagattcacagacccactacagacctactgagttggaagctctgggggtgggcccaggaatctgtgttttaacaaaccctccaggtgattctgatgcccctgaagtttgagaacctctactgtcttctgtgaagagtcccagaaatgcaggcatctggttaatcctgcctaggaccacccctgcctgatgccctttccctcctgggctttgtccactagatatttggcaattattcatggcccatattgtgatagcttatatttttgtggactgctgctgtttaatatagttgtttattagttttcttcccaagttggatcataagacttttagaatagttattgtagccaagaacctttctttctttttttttttttttttttgagacagattcttgctctatcactcaaacttgagtgcagtggcatgatcatggcttactgcagcctccaactcctgggctcaggcaattctcccatctcggcctcccaagtagctgggactagaggtgagcaccaccttgcccagctaattttttttttaaatttctgtagaggtgggatcttgctatgttgcccaggttggtctcgaaccagtaaacttttttgtatcccccactgcaccttgcaggtaggaaattatccataaacatttattaatcaatcatctagagcacaaaggtgaaatataataaagtaatgcattccgtaagctaaaaaatcacaggacttttaaagttctgcattataaaaatataatttacattatgatattacaaggtttagtatcccttatccaaaatgcttgtgatcagaaatgttttgaatttcagattttggaatatttacattatatttatgggttgagcatccctaatctgaaaatctgaaatccaaaatgttccagtgagaatttcctttgaacgttatatcagtgctcaaaaagtttcagattttggagcattttggattttcagtttagggatgtccaacctgtattatgtccttataatctcaaagatggtttgcatgtgttcacagtgcattggatttgggaatctacaggatctgagcgacagaatcaaataaaatcccatatgggaaaggcagtccagaataatagggggaaatgagttgaaatcaagatgacaagagttctagtcctgcttttgtcatgaaattagtgtgtcattttccatgaactatttacccccccgagtcatgggtctcatctgaaaaatgaggatgagctttagttgttattgtgttgttgctgttgaagatttttgtgagttaaaagattcattactcaaaaagtgaggctttctggggagagagggcttgtactcgagcttgagccaaaggagggtgggctccagcttttagccctcaaaaacactcgttttcatggtgggagtggagggagggccagccagggccatccaggaggactccctctcccaggggctggaatttatgtgatgagaactccccactcatgacaaaggagggagctgggagcccctgagatgtcttatcagcttgtttgggtgtgggacaaaagggacaagggtataatagggcttgaaagctgtcagtgggcaaacatcaaaaatggagtcagagctgggcacagtggttcacacttgtgatcccagcactttgggaggccaaggcggcagtattgcttgagaccgtgagcttaagacctgcctggagaacataggaagaccctatctctacaaaaatttaataattacccaggcatgatggcacgtacttgtagtcgtagctacttgggaggctgaagtgggaggatcgtttaagcccaggagtttgaggctgtagtgagctatggttgccccactgccctccagcctgggtgacagagtgagacctcgtcccttaaaaaaaaaatggagtcagactctttattgcatggttattatgcatagcacagttatgaacatataagtatggccttcttgcaaacattacacatttcttctggatatgtacccagaaggccaattctgggttatgtgttcaactttggtaaatattgccaaacaggtttccaacctgacttaccaaattataccccctccaacatgtatgattgtaccacagtttgtttatccaatctgcaaccaagagacatttggtttgttttcagtttttgtgataacaacaacaacaaaaaagctactgtaaatgtatgtgtgaaggcttctgggtgaagatgggttgtcatttcactttggtaaatacttaggttgttttgttttttaacctttgaatactctatgattccagttattcatagctcttcagcttgagggtttttaattttttttcctcctcttttttcctcttagaatcaagtgaccctgagaggacgtgtaccacacctgggccgatacgtctttgtcatccatttttaccaagcagcgcacccgacgtttcccgcgcaggtgtcggtggatggcgggtggccacgggcaggtgagctgcagtgagcaggccctgctgcctgcctcaggctgaatctacagtccggtgcatgacagaaagtctctctctctctctgccaggctccttccatgcctctttttgcccccatgtgcttggctgccgggatcaagtgattgccgaaggccagattgagtttgacatctcagagcctgaagtggccgcaactgtgaaggttccagaaggaaagtccttggttttggtgcgttccactcgttcctcaacttgctcctcacatgcctgcctggctggccattctgggtgtctgtttagctcatggaaataattcttccaaggaattgaagtcatatttgtagaaaaatgtttaaattttacagctgtcttttaccccccaataaataaataaataaagcatgtgacaattaaagtcaagggaactaggacagaagagagtaggcgtcgcccctctccaccagcccctgcttcctcatctgaccagtctctggagcatttttcgctcctttcttcttttggcccctgcagctgctttctctctgttttccctgctttctctagcgctccttgggtgatttctcttttccacttgtcactgtgtgttggcgttccttccgatttgacaccgagcccctcattgtgtcatttctccttggatacatcttccgtgcccatcgattctattctctccactgtgggaaggacacccacatctgtgaggtcatctctgatctttcctgaactccagtatgtgaccaccatctcctgcgtatctgcctggccagagatcttgaaagtcccttgcttagtctgcaccctgcatagccccgatgtgcctacccttttcatcaccttgagtgatgacaaccagtgcctggagtcatgctgaccccccttctctagcagctctgctcccacatctgttaccacaccccagagtctttctctgccgtgcctcctggaggcaaccattctcttctagccccgttgtcctcactgaccatccttcctctcacttgggcagggccagcctcctggcagcactcccttcctgttccacctccttccagtgcctcctccgcactcctggccattacctacctggctggagggattagagcatgccctgtgacccagccacttctctgggcttccaacaactgatgggatacactccatgtatttccctaggatccacgtgcctcactcaggccctcacgaccccctaattcatcttttatctttctctctgccattgccctactccacgcctcccacacctcacgctctggccatacaaatccgttctcaaacccccagatatgccatgtcctctcatgccaccaggctttctcacactgtccctttttctgacattttctgtctgtttctctacctggataagtccagcctacccactcacccagctcagagttaatttgtctttctgcaaagccctccaggaagcattgcccagactctctgtgtggccctccaggtctctgagtgagcctcctcctctctgaggaagtcgtcttcccaggagacaagggctgcatctgttcattttgcatcccttgtgcctggaataccacctggtgtgtggtgctcagcaaacgtttattgaattgaatatcatgagagtaataagctccctgtaagctgtgagctggtgagcagttgacaaagatgtttgaaaatttctacagtgtttgctataggcatattctgatttatactggcacagagaaccaaactaccattattcataatagggtaccaagtatgatgaaagctctaaggacaagctaacaccttctttctgcattgttcttgccacttttgtttgtttccctttaaaaatacaaaacagccatccctggagatccagggagacatcaggcatgggtcacatggagccctggccatccagcaggcccctgcttacccttaaggtcccgtgacccagccagcatgcaaggcttttgcttctctgagtagaagttccaagggctctgcctgggaactcatcattccctgcacagtaatgtggactgagcctttactcctggctttggcctgttcctgtgattgtttttcataaatcctgattcatttggtcttggtcttaacaataagggtgttgatctcagtgaagagaaagtacaggttgaaaatctcttatctgaaatgattgggaccagcagtgttttggatttcagatttttttcagattttggaatatttgcataatacttacagattgagcatccctaattcaaaaatcccaaatccaaaatgctccagtgagcatttcttttgagcatgatctttgagcatcatgtcagtgctcaaaaagtttcagattttgaagcatttcagattttggatttttcgagtaggggtgctcaacctgtataataagtagccttaggtctgtgtcatcattggaaattctaagacatgctggtggatttctttcaggtccgtgttctagtggtgcctgcagaaaactatgactaccaaatacttcacaaaaaatccatggacaagtcactcgagtttatcaccaattgtggaaaaaacagcttttaccttgagtgagtatcactttgtgggaaggctctggaatgcagaggcactcccacattcctgaccagctcgaggcccagggaggggctggcccatggatccgtcctcttccccgcactgcccaagagagtgtcagtgagtcccaggggaagatgctctttctccacaccaaccctcgcatgacagactttgccatgtgctgcctgggaaagatgactgtcctcagctatgaactcaacgggggtccgtaccccaagctgagattcaggggctgattaggagtttccttccctctccactgtttcctgtgtgccagcacagattcctaagacataccacacagggtaccctccactgggaaggacatcagccctgagtcccactctcctccgccatctaaccaagcagggagtgtccagagacatggcttccctgccctctctccttgtgtccttgaatgctaagagctaggatggccctgagtatcagctcctgccattctcttctgtggacccaccctttccctgtcatagattcctgaagagcccaggtactccagaagctctgggaggcagacacctcctgtacagtgaatattaagagcaaaggctcttaagcagctgtggaggtgaatgctgctcagccactccataaccttgcagccttgggaatgtcacctaacttctaggagcctcagttgccttatctgtgaattagggcttaggcctaattggttgggaggttggaaggtcatgtgggatattactaaggtttccagcacacaacattcaatgaatgatagcgattctcctcctcattatcattttattagttgtattattatacacataggtcgacttttttggtaaccactttattgagctataattcacataacatatagttcatcttttaggtctatttctactcttttatcccagctgtgcaaggttcccgctgacctgttctgtgatgtctcctcctgtggcaggtggtagggggagggtgtggctgtcaccggctgagtctgaggtggggtatttcccactcttccctgactccagaaccatgagcccgtcccacagatgctgctgggtggagcaggtggtaaaggcaaggttgaggccactcccatacacacctccccaggcatcaccatgagttgtttctgtctccacagcccccagacagcctccagattctgtaagaattccgccaggtccctggtggccttttaccacaagggcgccctgccttgtgagtgccaccccactggggccaccggccctcactgcagccctgagggtgggcagtgcccatgccagcccaacgtcatcgggcggcagtgcacccgctgtgcaacaggccactacggattcccacgctgcaagcgtaagtgcacgtttcccatcacccaagttctgctctggtcccgtgtggatgatgcttaccaggagcaggcttcttcagtggcactgtgctagagactcacctggagatctggagaaatgcagattctgattcaggagactgggctggagcctgagtctctacatttccaataagcacccaggtgatgcccatgctgctggtccatggaccgcactctaagtagcaatgttctagaagataagtatttgtgactcccctgctgtgtggcctatgcacttggcaaagcaggtgagtgtgacaagtcttaaacctcagaatcttggagagcttgatccccttcgtcacagaagccccttccatttttttggcccaacccaaactcagttgagataggacagccagggtcatgtggcagtgctactcactgaatgagaacccatgggacctttatctcagaaccatcttgtggtccgaggggtagggtaagctcacttcacgtgactgcagtgagaaatgcagtgtgcagagtccccatgcagaggccaaggaacaagaaccctgctgccaggttgtgccctgaccctgggctctggacgcacagggtactggggtgatgtggatgtggagccacttcagggagcctgagagcagcctcctaccaatttccagaatccttcaatggtccagaggccccatatgagtggcacacagtggcagcgaggtgggctccttggagggtctttcttggatctggctggctcctcaatccccatccacactgtctgccatgagcatttggtgtggttggtcttgactccaagaaatgggcctttcagatccaaatatttctctctgaccctttggaggcttctggaaagcctggcagttggtggagtgctgctggagcccaggcggcctttgaccctcacatggtatttctttatcccctggccagcgtgcagctgtggtcggcgcctttgtgaagagatgacggggcagtgccgctgccctccccgcacggtcaggccccagtgtgaggtgtgtgagacacactcattcagcttccaccccatggccggctgcgaaggctgcaactgttccaggaggggcaccatcgaggctgccatgccggagtgtgaccgggacagcgggcagtgcaggtgagctgggggagtagcctgtctgcttctgtcacagggaggtcgcgtgccatctgcccacacactggtcatcgtcactttccacttcccacctgtccaggggtgccctgtgttgacctcggcatgagcttcccagacaggatgggttgcagtgggtggagtgattggtcccttaggctcagaactgggcagagcctgtgtggacagattaccagtcatcttgggccggcagcagccttgcccattgactccagcatgctgtcactatgggactgtgttctgtgtgtgccatgaggcagaagtgggagaagaatgatacatgcataatgaaggtatctgtgtgctttgctgggatgccttgtggtgagcacctgtccatttgtatttaggtatgagcttcataccctccttctagggttcgctggcagtgtggttaaggtcaatgtgtgacagagtctgaaatcccacctagctgatttgggctggaaggggagctgaggcctccacagcagggcttggtgggagtgaggagggagtcagggtgaacaggagacaggctggagagcctggcctgagagtggggctgccctcagaggatcgctgagcagtccagtacttaattgctaagggacaggtggagacctcggctcatgcagatgctgcattgctgagaggtttgattcagaggctgcattggaatgtggaggccggtgtcacatggttccaggtgacaagcctgatctcagcaggactgggtgggggctgcaggggccagagaaagcgtatggctcctagaaggagagactggtaagaattagatcagtggtgatatgctggggaaactgagtcagaggccaggccaggatggcagcgtgcaggggaaagcagaagtttcaccatgcaccccactcccttcagcacgcaccccaggcacatggatattatggagtccgtaatttgggtgtgagagccaagagggcctatggctgctggggacaggcctcagtgactcccacttgagggtggctgtggtagtctcccatgactgccattaacgaatgccacaaacaacgctaaaataacagaaatttattcttacacatttctggagcctggaaattaaaaatcaagatgtcggcagggttggtttcttccggagggtctgcaagagaacctgttccatgcctttctcttcgcttctggtgtgcaggtattcctgggggagtccctgggctgttggctgcatcactgcaacctctgcctccgccattacatgctgttctccctgtgtgtctctgtcttcctgtggcgtttccctctctgtacgtgtctctgtctcttctcattttcttataaggacaccagtcatactggcttaaggcccaccgtactctggtataacctcatcttaacttaattacatctctaaagaccctgtttccaaataaggtcacattctcaggtagtggggggtagaacttggacagatcttttgtggggatacaattcaactctctatagcagcaatgtttgcttttctaagaaaggccccttaaccacacctttaattgttatctggtgcctcccaactccttgataatactggaaccttgtaaggaagctgggagaaaaactcaaatcatgaaatattccaagtctttaaaaccacaggtgtgagtcctgcctgagtcagctcagtcactcaagaaccagaggggatacctgtgtttaatcacaggaagcaaaggaaccaagggggagatggagaatcagttttcaggcaggaagagaagcagtagagttttcaaagggagtggtttgtcaacaataaatcgctgcaaatggaacttcacacacaatttctcaatgctgctgtcacagaaaaagaaaaccaagagtgcttttaaaaatgttttaatcttgttaaggcaccagaaggtgatggatggatttactgcagtattttatgtaaaaatccctaagaattttatttttaacaaactgtcactgccaatgataatttaatagactggaatattcctaactcaggatggaggcatgtctatagtaagttttgcccaaacctgacagcatcaacagaaatggaatcttgctgacttgtattacacttaaaccaagatgtaaaactgtttactttgaccttaggaaagggactataataatctaatgggataacgcatcttcccatgatcaaagtagatttgtcataaaagggccttgtcagaaaatgtaagaaaatttacattactgtaaattgcacaaattgcccatgataatttcagtgtaaatgctgaaaaagcttttgattgcctgaagggattacttctttataaatattagaggaaaaactatttttttcctccttagaaaatttcctttatgaagaatatgtttagaggagtctaaagctcatgtaaaagaaataatcagagatacctagagtttatgagaaaaaggaaaacacattctttcacagtcttgtcctgcagttgtacaaatcatcacaaactgcaaagctgaaaaattgcaattctcaaattgtatttaactacttataagcattcaactttatcatactataagaaaatcaaactgttacaaatattcatctactttaaaatgaattacaaaaataattttagcaatctacaatactcactctttacttagtcaacctggtgttgtagttttagaggcaataagttggaaccataaaactgagccttcgactcacctttggcaagtcctagctatgagactgggcaagtcattttgtctgcctggctttcagcttcttactctgtaaaatgaagtttagtaaaatcatctctaacttcctatctaaatttaaaattctgattccatttctttttcaatctctgattgtatcacggactatattgtgtaattatcgaaaggtctattattctggccaattctatcaagatcaaaaagatgcttatattgatcaaaacttcattttttttagcacaacaagacagcacatatatctatttatagcgatgaaaaagtaaatttgcatctgctcctagtaatggaagatatgtgccatcagattctctgaacatacaaaagggctagaatatttttggaagactttatccatctgtgtcagacgtgaggaagctggagatccctggtagtaaaagctgcagtactgttgaccgcgtccaagctattttcagattgatcaaaggagatggcagtccacctggacatccagtgaagccacgtgtacctcatgccttttcagaagggtagtagccacaggaaagatttggggattccctctatctccactcagatttactaagcctttgtgttaaatggagaaattaaaaaccagaaaaggtcatcgacttggtgttctcagaacagaagggcttccagctaggcatcaattcctgagccctaacaacttggagaggcaatttctttgatgcacttcatcaaataatctgtgaggctggccaggcagtgtgcaggcgctgggatgtgctgttgacacagtggtgacggctgtaacagccacacagaaggagctcagggttctcacctgcacgacctctgtcgtccttcgtctcctgtaatactggcatcttcttctaacctctctgatgatgcttctctggccatttcactggcttcatttttctccttctgcctccagaccaagaagatgtgtggtgtgagttgcgtcctgtctctgccgctcactctctgggtgacctcaggtatattacttctgtcctctgggccttaggtcttcatctgtaaaataaggatcctggaggcacctttagagggttaaatatcctctgtgaacacactgaaagcagcgcctgatacactctgagcacccagtaagtattagctgttgtggttatttgccaaggtcatggctgtctgccttcctccctctatggtttgtccctgagactccacccattctcctggcttcagccaccctcactcctggatgattcccagatccacagctccagtcctgatccttgagggctatcctattccacctttattgcaaatcgactcaacctgggttctcttattgactttacacaggtagccttggacaagttccctaagctctttgagctcctgtctcctcacatgtattatgaaaagttagattggataatcgttaactcctgaattctacaatactgatcctatctctgaaacccatgtcactgtcttccctttcaagccatttctccctttgggttaaaaaaaaaaaattctacttaatgataacagcctctttccagtcctttaagcctgaaatctgagtatcatcttagaatcaacccattttccctacagccagtcaggtgtcaacttctggcaagggacatattatcccccttcctttccatggctgtctacagcctggttaagtccttttaccacttcatgttcagatgatattgatgctttcctagttggccttccttttcctggtttactcattcattctttcttttttggctctttaagaagaatatactaaattgacaattatactgggattcaaatatctgtctttcccttaactttattcacaaatacatggtactattagtctgtgaacttgagacaatgttgataaatgcatacatgtttatgattttatcttctttttgttttatggcagcctgcccttaaatgtgattttatcttcttggcatgtatttctgtttgtttttgttattttaatgaggatgaaacatctcagttccttgtgaggttttttagctttcccttaagtgttattttgtatgtgttttgttgctcaaagtgcatctaatacctactccagtttgggtgctgtgcttcctgtggaaggcacacatgtttgtgatctggtgggggcacctgttctaaccaagagtgacagtgcagcatggtgagcgccatattgtgtgtgggctgttatgggaacaccatttccatgacatcacattctttgctcaagaactttccttaattccccattgtctaataggataaagaccaactttccgtgatttgacttctatctaccctaacttttagtacctttttgttttttctgctttcttctctggcttggttttctcacttcctctaaacactttttgtctgtgttctgttctccagttgtgaaagggctccctcctcctctcctactacccccaaattatgcctgtccttcaaggatttttgtgttaaaagtacagactcaaagaatgcaaggagccttctacgagtccacagagatcgcctcatcatctcattggccaaagcaagttgactgcttagccagcttctcccttaatttccacattctaggtcctgtgtccgcagtgaaacatgtccacatcaagactgacttattctactttgtcccctccctcccatgtcccctaacaaaggaatgtgtatgtagaaggcactcaataattcttgagtgaaaaaataaataaataaataaggtagattttgggctctaggttaaaactggactttgatatgagcataatatgaagggccctacagtgtttattaatttattcatttgagatggagtttcactcttgttgcccaggctggagtgcagtggcgtgatctcggctcaccgcaacctctgcctccagggttcaagcgactctcctgcctcagcctgccgagtagctgggattacaggcatgcaccaccacacccggctaattttgtatttttagtagagatggggtttctccatgttggtcaggctgttctcgaactcccgacctcaggtgatccactgcctcagcctcccaaagtgctggaattacaggcatgagccactgcacccggccccttaatgaccaaaggatgcagctcaccccaacacatctgggcctgattctctgagacatggcaagcacccacccatgcccagatgttgttacaaaacgtttggccaggagccccattgccatggagataaattctcttgacctgcctccccagaattgccattctgcagctactccttgggtaccagaaattctggtagggctgttccttgggtaccataaattcgctgtagagaaacataccaagtcaggccgacatgaggtcattttaaaggatgttcagccagactttgaagaggaaatgtcctcttccttccctattgtcatggcaccaccaaaaacttccctattgtcctggcaacaccaaaaactgtctttgcacaggatgcataactcaattatctaaacattgcagtactcaagaatatagatattgttttggttcaccctggcctagcaggcccagcggggccactcagggtcccatttgcaggccgctgctctcctccctctgctctgttggcttttttcccatctgctttagtgctctcagctgctacccatgtgctgtgtgaggctcagagcttggtcctatattactgactggccacatcttctcagtcactctctttccactggatcatctcgcatacattctaaaataaacacacaggccagtcatgattttgcttcccttcctccttgtctggacaagcagcttccacagctgcccttgctgcaggtactcttgttcctttcctttccagtgaagtgaaaatacaaaacgtggccaggtgcggtggctcacgcctgtaatcccagcactttgggaggccaagttgggtggataacgaggtcaggagatcgagaccatcctggctaacatggtgaaaccccatctgtactaaaaatacaaaaaattagctgggcatggtggcgggcacctgtagtcccagctacttgggaggctgaggcaggagaatggcgtgaacccgggaggcggagcttgcagtgagccgagattgcgccactgcactccagcctgggtgacagagcgagactctgtctcaaaaaaataaataaataaaaataaataaaaaaagaaaagaaaacataaaatgcaggctccagggccggatgtggtggcttacgcctgtaatccctgcactttgggaggccaaggaggcggatcacgaggtctggagatcgagaccatcctggctaacacgatgaaacctcgactctcctaaaaaaatacaaaaaattagctgggcatggtggtaggcgcctgtagtcccagctactcgggaggctgaggcaggagaatggcatgaacccaggaggcagagcttgcagtgagccgagatcgcgccactgcactccagcctggtgacagagcgagactccgtctcaaaaataaataaataaaaaataaaaaaatttaaaaaaataaaccacacacacaaaaaaaccacaggctcctgtctgcgtgacctcactttccaggtccctgcccagatcacttgctcaggggacactctgagttgtgcccaccaatggcgttcagtgtgtgagttgctcacctaccaccagcatcttattaattcacccttggccagaagccccgcatgtttgctaaaagaaacgttcagaccttgggatgccagtctgccaggttggcacttcatggcaacactgtccctctgtgcgtggtgttctttccttcactgccaggaaaagagaagcaaggttcacccagcctacgtcgggccatctccaatggccctcttctgttctgaggcttctctctctgatggcttttattttgggaggggtcatctgctctctcttctttccggtctctagaccaccagagtccttgtgctccacactcgctgtctctccagaaataaggaatcagctgagaacaggctttacatttttgccagactgcctgattacatttagtccgagggtcacaagaagagagcagttgttattaacctggggccaggagccctctgataagagaatgcaaaattgtgtgtatatgagaatgagtctttctgtgagtttagtggacacttttctgagaatatggcccatagtttacccagctttccaaaagcgtctccgatcctctcccagagtttacaatccactgcactagagccatccacttcaagcagaacatttacactctatacctacattactctaagtgtggttttgaggctacttccttatggaatcatttctgcaggtatcgagtagggagaggtgagagggatggggctgaaagatgcaacttgccaggaggtcttgcaagtaatgctgagttggtccttttagttgtgccgagtggacagaaaggcaccgtctcctccccttagcccatgtcacagctagaatagtaatagcaaatacttacgtgtgtgcaagcaactcctgtaaggtttttacatgtaatatttaatcctcacgacaatcctgtgaagtagatattgttacctccatttttacagatgaagaaacttggttgtaaagtgaccaatttgcccaaggtccagtaagtggtagagttgggattcaaagcaggttacctggttccaagtttatgttcttaatcacatacaaaatcctttataagcagatatttgccaaagggaaataagcagatatttgccaaagagaaacttaatgggatatgaagagtcgtatttaacttttttaggatggtcactggggtaagatattttcacaggtattaggagataggtgatggcctacatttggtagtaattgaacaataaagtgttattgcctatatgccaataaaaatgtatttctaatacttcccttagtcccacagaagagaatcagtgtgtaggtagatcccagctctgaatgcagtgcttggctccccagggctcgcggcactttctcttcccctctccaacctcgagttctgggttctccaggcacagccatagcccactgcttttctgcctctgctcagctgtttgtgttttcttgtctgcccggatcttcagttaaaaggacctgcagatggttgagggtggatgactcagagtgaccctcccaccccccactgtgctttcctctgagctctggcccttgcaggtaacaagggacattaagatccactctgtcacccaagcagggaaattgggagtcttccttgtcttctcttctttcctctactcctcatccagaatcttacagttcccagaaacctcaccccaaaatagtttgggagcccatccctcctccccatctggatacctttgccctaggttagcccccagtctctctcctgacttgacatcctgctgctgctgctgctggaattcaccctctgggctccatccttcacacaagtccaaccacaccctctcctccttaacagctgttcatgttgccttgtttgtaacttgccaagtgccaggcactgggatgaaattttgcatgcactgcctcatgggttcccagcaatcccaggaggcagcagctaccgtgttctgtccctcataggtatgaaaagcaggctttgggaagttaaagaacttgctaagatggtgtgtctcatatggtcagagctggattagaactgcagccttgcatgcacaggtctcagctactgcgctgtgctgccgtgtccagcccctctgtcctgatgatctgacaccacctacctcctcaggccatggggcagcattccctgcctggacatctgccccagcagcaccatgcttgtgttgttccctgtacacactgagtgatctcccgctctgttccttctgtctggaatgcgcatcccaacttctaccctatgactctgccctttaaagctcaggtcaggagtcatttcccccagggaaacttgtcacctgctactcctctgaacctcagttagattctgtgtaggttgtcatcatttccacttatgggccatctgcgggagccctccaggctcgggggccatgtcccttcttgcgccctcaacacctagtgctaagcctgacccatctacgacggtcatccatgaccatccacaatggccattggtcaatgacctacattctgtaagtgccttttatctgcctctctccattctgccttggactataagcaggcattgtatctatttaactggctttgcacaccaattagtccactatagtgtaagtgagcactttaaaattgtgtgtacaaagatgatgatttttgcttcctttactttgtgtacagatgcaagcccagaatcacagggcggcagtgtgaccgatgtgcttccgggttttaccgctttcctgagtgtgttccctgcaattgcaacagagatgggactgagccaggagtgtgtgacccagggaccggggcttgcctctgcaaggtaagagagatcgtgcaatgccagacaacagctgccggtcagcaggaaagtgcttcatgttgagtcaacatagaaaagtatgtgggaaatgggactgacccgtaagagatgttgatagtgtatgtagcattttatagtcacgatctcattttacagaaatagttaggaggtgagaccccttttatcttttggagaggtctcagaccgccttagaatctgatgacggatatagaccctttccagaaaaatcagcacaaacttttatctacagtttcatgaggttcataggttcacctaaaacccattcctggaccatggactccaggtgatcatctctgctccaaggggttccgccaggttgtaggagaccttccaattcccaggagatgttttaaggtggtggtgagtgagatgaattggtctccccatcctgtgaaccgtatggtgctatttctctacttgcaagatgccccaggggcatcttatgaaatttagagaattctctcctccatttgtgtgtggtataaaagtttaaacaattaacatgggatgaaagcttaataattaacatctcttttaatgttttgctcacatcctcatcctaacatcttgtgttggtatttaatttgtgcaagtagctaattgcaactagggaaattttggaacacgtgatctcttatttcatgttttgcttcaataggaaaatgtagaaggcacagagtgtaatgtgtgtcgagaaggctcattccatttggacccagccaatctcaagggttgtaccagctgtttctgttttggagtaaataatcaatgtcacagctcacataagcgaaggactaaggtatgcattgacagaaagtgctggggaacattttgtacatggatttgttaaatgataagcatatccctcgctgctccttggcctgcagtgttttaaaattcttgtttcctgaattcgtcagttgtttgctcgaatgccatgtgttcagaggggctttccttcaccacttcctataaaatagcacaccttggacactcttgctgaccttacccttgtcttccccataggagtcatcactccctatttaacattttgttttaaaatttgtttattgcccttcttcttccatccctagaatggtgagttcgctgatacacccctagtgcctagaacaggatctgggacataatagatgcccaataaatctcattaaataaatcgagtttgtcattttcccctttaaaagaaaaccttgtttctatactcacaacactctaacaccaaatgtgtggggttttttctatactaaaaattctctgattctcccagacactccggggtgtcctgcaattcaattcacttctgacactctctacctggaggtggcatcagactgcacaggctaagggctcagttcttccagactgctcccacttcagatgccagttgcaagtcccaggcctccagtacttctccagtgctttgctacaagttgggggttcccacagcccactcctcatgtttataatctgctataatggctcccagaattcaggacacactttccttcctattgctgtttattataaagaatatgataaaggatacagagcaacagccaggtgaataggtgcatagggtaaagtccagagggttccaggcatgggagttagggcgcaccatcctcctggcatgcagacgtgtttacccacccaggagctctcccaaactaccatttagggttttttgtttgtttgtttgttttttggtggctctttcatgtaggcatgattgattaaatcattagctattgataattaactcaatctctagtccctctcccttcctcagaggttgggggtagggctgaaagtcccaaccctctcatcctaccttggtcttcctggctacaagcccccatcctgaagctacccagaggactcagccaccacttatctcattagcacacaaagagacactattaccacatcagagtccaagggtcttagaagctctggcctcaggaactgtggactaagaccaattactatggcaaaagatgctcctatcacccctatcattcaggaaattacaagggttttaggagctctgtgccagaaactggtagtaatagccaaatccgcatctctcatgatgtcttgttatgtcacaatatcacacccctcacttctcatttttacttctcttctttctgttttgctttccttctcacctattttatcatatcttttctttggtcacttttcttttctttttttttttttttttttgagacagggtctctgttgcctaggctggagtgtagtggtgtgatcacagctcattgcaaccttcgcttccagggctcaagcaatcttcctgcctcagcctcctgagtagctgggactacaggcatgcaccaccacacctggttaatttttgtattttttgtagagtcagggttttgccatgctgcccaggctggtctcaaactcctgggctcaagcagtcctcccaccttggcctcccacagtgctgggattacaggtgtgagccaccacacccggccttctttgggcatttttaaaattaacttcataaaactaaaacttttcttgttttcattattccatgaaccagtaacctcatgcttgccttctttgtgtgagtcatgtcttatatccaacaagtactcaaaaaaagattttttttttttttttttaagatggagtgtcgctctgtcacccaggctggagtgcagtggcatgatcttggctcactgcaacctctgcctcccgggttcaagcgattcttctgcctcaggctcctgagtagctggaattacaggcatgccccaccacacccggctaatttttatatgtaatagaaacaaggtttcaccatgttggccagacaggtcttgaactcctgacctcaggtgatccacccacctcggcctcccaaagtgctgtgattacagatgtgacccaccgcacctggccccaaaaatactattttatatattttactgcctgcctatttcatatcttttactgcctgtctcctaaaaggagtgtagctagtaattggaaaaaaaaaatactttgtaaatctgctctgaagtctcttatcccctgggaaccagaaagcattaatccaatcctatgcttgctcagttctttcttttttttttacctcaaaattaactggcttcctttgtgaccaggaaaagatttaattttgatgctccatttagagaaaaataataatagcaggccactgaattccacatcacatttttctttataaggagcttgccattaaatgcgccatggtcctagtttttattcatacacttatttctttattattcaaacactcattgatcacctactaaatgtcaagaacaatgatgtgtgctgggttacaaagataaatcccacacatgtaaggccactgccttcccagaactcccagtggcaatgggtcagacggggctctggctcgggagggcaggtgcaggagtagacgcataaaggaggcctctgaggcaaggaggctgcccgtggagctttctgtagtacatcatgcacccatcaccccagggatgccacgaccaagacgtttccatcccttgcttctctccctctttccagtttgtggatatgctgggctggcacctggagacagcagacagagtggacatccctgtctctttcaacccaggcagcaacagtatggtggcggatctccaggagctgcccgcaaccatccacagcgcgtcctgggtcgcacccacctcctacctgggggacaaggtaatgatgtcctgctgttcttctgggccctcagtgggcctctgctattgctgcatgagcatcatttcctggaaatctggaaggaagcatccagcagttcaggttactaacgttccagaaatgagctgaactaaaagtgaggaagagaccctgcctcctgctgtgaggggctgagcaggcacacactgcgccccaccattgccatgcatgagctaccagcaaaggaaatcacccacaatgtttttctcagtttttacctaatgtcaaagaattttcctccagggaaataaccatttaaatactatctattgcaaatgggacatgcgtgcttttaaatgccaatgctgagaattctttattttaaggcagaagaaagcctctttgttaggaaaacgaaagctaacaagtgactcacaagcttattaaaagaaacacaggatctggtggcagttcgactttcctaagtagaatcacatagttacacactcctcaggaacttacaaaccacttgctcttcctttgctgcaagagttattatgccagaggctggccacctccatccattttatgaggacagaaatgcaggcctcatgtggaaacatgaggtgacatatgtttcttagcaagggtggaacttgctaacgggtggatttcacagggcctggctcaggggatgccaaattctcacattaggaagactaaaataatagggccttgttggcctgaggtctctaactttgtcttctgggtgaaggactgtgggttttgacatctgagtgtgggaaatgttgcctctcttctatgatcccacttctctttcacttaatactcctctttaccgctatatgacgggcccatgtgttgattatctattgctatgtaacaaattactccaacacttcgcagcttaaagcagtaatgattatcttggatgaggaattcaggaggggatggcccagagtcttcctaggttactgtcaagatgtcaaccagggctgtagtcccctgggactgcagcatctgcttccaagctcacccacatggctgttagcaggcctctgcttctggctagctgtgggctggaagcctccatttctcatcacgtgagaccctccataggctacctgagggtcctcatgacatgacagctggcttcccccaaagcaacttatggggggtgggtaacagggtgggggagagagagagagagagaaagagagagagagagagagagctagctcaagacagaagctgcagtgtttttgtaacctaatttcagaactgccatgccctcacttctcctttattctattcattagcagcaagtcactaagcccagcccacactcaaagggaggggaatttggtggctcacgcctgtaatcccagcactttgggaggccgagacaagcggatcatctgaggtcaggagtttgagaccagtctggctaacatgatgaaacacctgtttttactaaaaatacaaaaattagctgggcatggcggcaggcgcctgtagtcccagctactcaggaggctgagccaggagaatcatttgaacctgggaggcggaggttgcaatgaactgagctcgagccattggactccagcctgggcgacagagcgagactccatctcaacaaaacaaaacaaaaaggaggagggggaattaagccccacctcttgaaggcaggagtgcaaagaatttgtggccatgtttttaaaaccactttaagcccatcaaaaaagcaatacttaaatcacaataataattcaagacattgccttggaatacttccaggcttgaagatcaaagctctgtaaggctttgtcaggttacagactctagggaaaagcttctgttgaatgggatcctagaagagcgtggcttctttcccctgcctgctctaagttgttggcattttcctataggttattttgttctgtctaatcagaggtgaccttgcctgtgattttcatccttctgtcacttcttccttcttgattgtgttttacttaaaggatgggaggtgtcaggacccaaggtgtgaagtagctgtcagaaaactgaccattcactccatgtcctcaccaccatcatgctgcttgtgggacattgagaggtctgtgcacctgctggagttgtcagccatggctactgtacacagcagaactcacaataatttgggaaatgttcaccatctgctttcaggagaattgtttttggagaaaatttatttttagaggttattttgtgactgatagatattatccagttctctcagttaaaaaagaaaccaatggcctagatttcctagaatagttgtggattaaataaacattttggtttagtaatcatctagaaaaaaaaaggaacacgactattatttttcttactttctttcttttctttctttcatttttttttttttttaaaagagacagggtcttgccctgttgcccaagctgcactgcagtggtacaataatagctcactgcagcctcaaactcctgggctcaagcgatctttccacctcagcttcctgagtaactgggactacaggtgtgcaccaccacacctgactaatttttaaatatttttgtagagacagggtctcgctgtattgccctggctggtccctaattcctgacctcaagtgatccttctgcctcggcttcccaaagtgtgggattataggcatgagctactacacccagccatatttttccttttaataaaggtatcttcttgcttgtaaaactcaatcatgttcatgctaaacatttcaaatgacattaaaaatagcataaagtagaaaaaataccatcctcaaccccacctcctagatacaacccttgttaccaggtcgagtgtgtttctttccacaccttgtgtgcctaagtgcttttcatgcgggttgatgttgacatcatctcttttaatgcttgtgctattgatgctattaattccattttaggtttcttcatatggtggttacctcacttaccaagccaagtcctttggcttgcctggcgacatggttcttctggaaaagaagccggatgtacagctcactgtaggtatcagagcatgacctaagtggcaggaagtggcagttgcagttggtgctgatctaaatttaggacatcttgatatgtggcctacaaaaagtttagattaaatcatttccaatattttgcagaaactaaatgaaagttgaaagcatgtaacatcttttcaggatcctgcctcctctgaccaaatgttgtctgtcttctctgcctccaaagtacttaaccgtattttgcttttgcctctcacaagttactgcctcatgttaaactttttttgaactttttttatctttgtagagacagggtctcactgtgttgcccaggttggagttgaactcctggcctcaagcaatcctcctgccttggcctccccaagcactggagttataggcacacaccaccatggccagctgaggagtttttaattttaatttttgtagagataggatctcactatgttgcccaggctggcctcaaactcctaggctcaagcaattctccctgctcagcctcccaaagctctgggattacaggcgtgagccacatgtccagccacatattaagcattttttatgtttctatctttcaattttgtttcataaatgtctttgaatccttaccacggggcaagatcatattgttggactctgtaaaggacaggtgaccccttttctcaaaaggaggggagattagagaaatatgccaggaactccaacccactgaatggtaactattggaggagagccaaacagggccctctcagtgctggggtctgggtagggggaatgggagtcatgtggtctgagaggcccttagaagactttgtggttcattttgagctaagtctttaagaatgggcataagaagagaagtgcccttccaggggcagggacaaaggctaacaggactcgggggtggtacagggcaggaggctgtgctcatggatgaccagtccaatggggctgtatcatcagtgtgtgcagagtcattgaaaacaagtctggaagggtttgatgctataacaggatttttagtctgcctccctggttcaagcaattctcttgcctcagcctcctgagtagctgggataataggcatgggccaccatgcccggctaatttttgtattttctttagagatggggtttcaccatgttggccagggtggtctcaaactcctgacctcaagtagtccacccaccactgaggggacgtttgttttttgagaaaggaagtaacaacatccacacactatgtgcctggcacacaatccagtgcggcagtctagaaaattccttgagggcaagggtagtatcacatcctactttgaattccccacgacacagggcataataccctaaacatagggtagggtgccactgcctgaagtcggctctatttctggtttattgggtgtgattaatgcgatgtaatgatagctttgggaaaggttttctcatgtcatgtactgtatacagggaccagcaagtcacacacacctcatcacagcatattcttggtagatatttgtgttcaggcactgctgtgttgctttgtttttactggtatgcaaatctactaaactgttttaaaaactccaaggaacctttgcagaatatcttgaagataaagcagcaaagattttagagttatagtctaaggaaaaatagctacacagtaaaaacacagtcacagcagtgctgtatttcagtttcatgtttttgcagagcatcttgtagttcaggccaggcgtatttttttactgccaaagagtttattgtgcaaaccattagaattcactgagaggtaatgaccaaattttctgtttaattttaccttcaaacatggaaaataatttaggctcacaaaacattttccctgctgctttgttctaatccactgtaattaagagcctctagggcatgtttcttagattaaggttttaaatgatatgtgatcctaggtaatggccttctttctgaaataccagccctaatgaaataccaaacacctttagggttttgtgctacagcagaaaagctgggacatgtgtgtgtttttgcagcagggttgctgatggtagggtgctgatgcagtagtgctggccaccccaccttgccctgttaagatgcacatgtgagccaccataatggggtgggctggaggctgagagcgagtgaggctgggtcccacagggggaggcagcaggggaatttttcgctccacatgccagctgcagctccctgcatgtgccaaccctctgccctccccaccctcctcagtaacccacccaccaaagcactttcttcccaccgcaggctggttcggtggccagtaatgaaaacagcacttcctgcattgactgcaaggcatagtttaaaaaatttttttttctgccaggtgcagtggcccacacctgtaatcccagcactgcgggaggccaagacaggtggatcacttgaggtcaggagtttgataccagcctggccaacatggtgaaactactaaaaatacaaaaataagaagggtgtggtggtgagcacctgtaatcctagctactagggaggctaaggcaggagaatcgcttgaacccggatgccagaggttgcagtgagccaaggttgtgccatttcactccagcctgggcaagagagtgagattccatccctgccaaaaaaaaaaaaaaaagaaaaaaaaaagaaattccatctttttaagctatttttgtccaaggcaattttcctgatttcctatttgtgaaaagacactgtgttacttataattattctgtttccatgtcactaatatttttaccagtcagttaattctgaactatttttttaagtcaggtatgtcatatgatgtagaccatagaaatgttttcttagatcagttataaatcttgaaagatcccagtgaaggtactaacacattcatggttttctttaaacagggtcagcacatgtccatcatctatgaggagacaaacaccccacggccagaccggctgcatcatggacgagtgcacgtggtcgaggtaaaggaagagcaaccataggatggtcctttctgttttgtgacttaattatttcagacaatcatgatttttactcattttaagaattgtaaaatatggattctatttatataaatatgtttatatatacaggttgagcatccttaatctgaaaatccaaaatccaaaatgccccaaaacgcaaactattttgagcaccaacatgacactcaaaggaaatgctcactggagcatttcagctttcagattttcagattagaaattctcagtgggtaaatacaatgcaaatgttccaaaatagaaaaaaaattctgaaacttggatcacttctggtcacaaacatttcagagatacccaacttgtatagattcaaaacatgaattatataaaatgtggagtgtttgatgcccatgtggctttcttggtaccatctgtccagcctttttacactttctctcccatttcacaattaattatccatatcttaaaaaccccatgagtcagcctgggcaagatggcaaaactctgtctgcacaaaagcaaaattcaataggcatggtggggtgtgcctgtaatcccagctacttgggaagctgagatgggaggatcgtttgagcccaggaggtcgaagctgcagtgagccatggtcacgctactgcactccagcctgggcaacagagtgagaccctgtctcaaacaaacaaacaaacaaaaaacctgtgagcttataaatgctatgacatagctctctgtcatcctcaggtctccctcagtgcctgagacctggttaatgttcaacatatgcttaggatgaatgaatagaaaagctatgaaaatgttttacatccaaagaaataagagtaatactagcaaaataaaggaaagctcatcagatcataaaacttttgttatacttatttggttacaactattccttaaaaatagtgttccatttatattattaaatatgaccagtacctctaggtgaaactttttgagtactttgaacttgcagacatattttaatgtttctgaaaaggtacatctatacaatggaatactatctggcaataaaagaaacaaaatattgatacttgctataagacacaaaaaaagtatcatattgtatgattctatttatgtgagacaggtgatatcagtaaaatgatagagaatctctaaaaattctgtccttcataaaagcaatgagagaactggcaaacagggaaaaaaagttcagaatcaacgttttcagaactctggaaattactcaaagccttgcagccatctggaaatggcacacaatgtataaagatgcaatttatatgatagtaacataccagagaagaggagggaatgatactaatagaaacaaagtttttgtatactgttgaaattaagctggcatttatataaatcgtccagcatggacacatgcatagagacagaatgtagattagtggttgcctgggtttgagggtggtaatgggtagtgactacaaattgacacaagggttcttcttaaggtaatagaaatgttctaaaattacattatgatgatgtttgcatgcttccgtaaatttattacaaattgtatgcttaaaatgagggaatattattgtatgtaaattattccttaagctgctaaaatataaattaaaattatataagcatcatatttgtatgttagtaatagctaccatttgttaagaatggtgctgaacactttatatatattgtatcatttaatttaccttaattataatgatagcacaagacattaggtattactgtgcctatttaagagatgtaaaaactgagttcaacaagggcaacaaaatataaaggttaaaaaggcaggcttttggaggccaggcgcaatggctcacgcctgtaattccagcactttgggaggctgaggtgggtggatcacgaggtcaggagattgagaccatcctggctaacaccatgaaaccctgtctctactaaaaatacaaaaaattagccaggcgtggtggcacacacctgcagtcaggagtttgagaccagcctggctaacatggcaaaacctcgtctctaccaaaaatacattaaaaaaaaaattaggtcaggtgcagtggctcacacctgtaattgcagcactctgggaggctgaggtgggcagatcatgaggtcaggagttcgagaccagcctggccaacatggcgaaaccctgtctctactaaaaatacaaaaattagccaggtgtagtggcacgtgcctataatcccagttacttgggaggctgaggcaggagaatcacttgaacccgggaggcagaggttgtagtgagctgagatcacaccactgcactccagcctgggtgacagagcaagactttgtctcaaaaaaaaaacaaaaattaccaaacagaacatagcaagtgttgacaagagtgtggtgaaattgggacccttcagccctcttggtgggaatgtgaaatggtgcatccactgtggaaacactgtggaaatatctcagaaaattaaaagtaggattaccatatgctccagcagtcccacttctggatatctatctaaaataactgaaaacagaatcttcacaagatatttgcacattcatgttcattgcagcattattcacaatagccaagaagcaaccaaatgtccatcaacagatgaatagacaaagaaaatgtggtatatatagatatatgcaatggaatattattcccccttaaaaatgaaggaaattctgtcataggctataatatagatgaaccttgagaaccttatgctaagtgaaacaagccagtcacaaaaggacgaatacttcatgattccacttatatgaattatctgaaatagtcaattcttagcaacagaaattagaatagtggtgccaggggctggggagggaaaaagggaattgttcaatgggtatggagtttcccttttgcaagctggtaagttctagagatctgttgtgcaatgttgtgcttatagttaacaagactgtacagttaaaaatggttaagatggtaaatttcatgttgtgtgttttttaccacaataacaattaaaataaaataatataaacgtttgtgcaagaaaagattgtattttctgtcaccgatgtgtacgtttaatgaatgacctgagctgcatgactcagtcagtttccatatgccttccttccctctttctcactcaccttatgtttgcacaaacaaaagcacatttaaaagataagttggacactgggaattttatttcattttattgccccttattccctgccttcattttttttccttccttcatgggaataacccaggacacctgacttctaaatgtaaatactccaggaggcaggtatttccccgtcttatttcatttctccctatgcattttaagtgtcttgtttttgattcattcggggtgtctgcctctaaggaacccctggaagtgagcctgcctaaggaagaccctgactttctgtttccatgtgtagggaaacttcagacatgccagcagccgtgccccagtgtctagggaggagctgatgacagtgctgtctagactggcagatgtgcgcatccaaggcctctacttcacagagactcaaaggctcaccctgagcgaggtggggctagaggaagcctctgacacaggaagtgggcgcatagcacttgctgtggaaatctgtgcctgcccccctgcctacgctggtgactcttgtcaggtaggaagttttcccatccgcaacatttccctagggagctcctgtggccgtttttggctgctgtccagcactgtgggatggtttggggccctctgtctattgtttctctgttcaagtttctgcagggcttatcttatatcttacttagactcccttcaggaattaagtgtgaaaaagacatcatcagtgtctcagaattcataggaaagccacagagattcaatagatgctgagggttagagaaatccagggtaggaaaataatgtactatagtttcaaatagctagaaggaggatattgactattcccaacacaaagaaatgatcaatgtttgagatgatggatatgttattaccttatctgatcactaaacgttgtatgtgtcacaacatcactatggactccataagtatttatcattattatttatcagtttttaaaataacatattttttaaatgaaggagctcaccagccagcatcttagtatttgagcccctgctttcccaataactgaccttatacctttctctaatccggagcctccctctacccactctcaactccccagtagagttgaattccagagaatatcctggatttcttagaggacattatgttctagcttgcagcaggactctcgttgtttgaggtccagtcaaccagagctgtcttcagatgattaaaatgtgccataaaatgaaactgtttaatttctctggctataagtatgtcttttcttaaagatcagggcaaaagcacaacgttagcatgattaataaaagtagcaaacactcattctgtgtattccatacatccataagtacgtaggcttagcaaaacctttcactttctttcctggccccctggtagccgaaaaccccaaggtgatctgcgcatacgagttcccactttttaaacctgcaaaaacaaatctgacctgctgtggtcttctggggactccaaagttgtaatatttagcccacaggttgcctacattcttccccttcctccatctcttttctagcctgattaaaattgatagcccgagggaaagagagggactctggatttccaccctcctacccagggcgtgttccctgcccgtgactcagcctgtgatttagggcgtctgcagggtgaggtgggtggaaggtgatgcccgccccacctcacaggaattacagagcggtgcgcttacctgcgggactgttatgtgcgctctggcacaggctgactcatgtgtgaagtttaaaggtggggcccctgccgcagacagccttcctcacctgagtcaggcaggcccgggcactgagcaggaagggcaggtataagaggaagaggcagaggttcctgcgcagccagcggacgtccaggaaccgggatgcctccagcagtgaggcggtcagcctgcagcatgggatggctgtggatctttggggcagccctggggcagtgtctgggctacagttcacagcagcaaagggtgccatttcttcagcctcccggtcaaagtcaactgcaagcgagttatgtggagtttagacccagccaggtaacgtccttttaagttttggtttgtgatagggaagagtttccagctttgtgacattttaagttacagttacggtgattaatgagtaaatgggtggactgaggaggggctgatggcctcccagtcaccttgactggcagtgtttattacagtgcctgacagattgctctcccgagctattaaccgcaaaccccattaacatcagcccacctggaaatgccgagacagttaagagcttgaatgcttgcgggatgttaatatacgatgaaactttatgccctttagagaccatcccaagcctcagaacaaaagagtccaatgcctatagctttccaaatgctacttggaagaaaatttacccacgggggggagaaaatgggaaagagtgaaatccaatgcttgagaaaagtgatcaaagtttgcataatacctaaaagacatgcttccatttgccaggcatgaaacattaagaaattctgctctctttaaacttcctggatgctgcatgtattcttacagagaaatagatcctatggctacagatacagccctggaaactggattagggacataatattatcatttgtatataatatgtattacaaaagtttactggaaaacttaacataaaacatcatcatgttaactagttataaaacccctgtattgaaatagtgcattagaacacattcgttttcatttaaaagtgagtgttcaatataatctgagtacttgaactgatttttttgtagaatgtggttttgcttgctttataagaggtgaaaaaatgattctattttagtaactgacaaatcctcagagtcacatgatatgtaactcttgcagagtatattttctgcttgtaatcaaaagcaaattaagatgggtgatttagttttaatcaggacagactatactcccccaaagcatgtttaattaaggcttttttctcaggcatgttgtcataaactaaccagatctatctgcttatttgaataacttgctctttaccaaatgtgattattttgtaagcaggtaatgtgatatacactgataattataagttacttgccacttattaggacagattgtataatagatagaatgacaccatcattggctgcatttcgttcacatgtaaatctcaattgtgctttcagcaaaataacattcctttcatactttgattctcctttaggcaagcctgttcatataacaacataatctatttatttgcaatatactctttgccctaaacatggttcctaatagcttaaaggaacattatattggaaactgtggtcttattgtgcatgatctatattcattggtaattttggaaggggttctagcaacacctgggagattccactcccggagcacatgaggcttctgcctctctctcctgtcaggtggcttctttctcacttccactggaccaggtagagacctttatggccatgagtgaataagaatggactgtctacttcaagatttcctttgagtatagtttccaagttttacagacatatgtgctatttaaagaagatttgataaaagactatcctttatcttgaaatagttttcctgatgctttcaagatagggtatataggagatcagagaaataaattagggacaatatctgattttgtttatttattattagacagggtttcactcttgttgtccaggctggagtgtggtggcgcagtcgtggctcactgcaacctccacctcccaggttcaagcgatcctcccacctcaacctcccgagtagctgggactataggcatgtgccaccatgcccggctaattgttgtattttttggtagagatgaggtttcaccatgttgcccaggctgatctcgaactcctgggctcaagtgatccacccgcctcggcctcccaaagtgctggaattataggcttgagccaccacaaccagccaatatgtgatttgaatctgtgcactgatttgctctgccaaaataaaggacatgtctataatttcctttaaagacagaaatctaaataattttaatggctggtataagaagaattgttttttttctgttggagggattcttaactagaatccttttaaaaagatattagttcatgaaaagaaaattataattcttttcatccagatgaaaatgcataacttgtattatactggagagagataatatacaggagatagaaataatcaaatcaagattgaacaaggaaacaagaccaacccaaggagagtccctcaggctgagcctctgtgtgttcgggtggaccagatgttcgtgaacagtcctgtatgggaacctcatgcacgctcccctcccctggcttctctgttgcccatggcctagtgagtggcaataaagtgactccactgattgtggcatgattgtctaaatctcagttaagactcctattccccacaacccactactcctactatactgccccctcaccagcccaaacccacacttggagagaaaacggctagccaaagataatttggacttgaagtgatttgcttagatgtcctcccctctaaggacgagtctctttatttgtccatttccaccttctccacctgccctcaaaacagttgtgagaagagaggagccccttctcatcccccatctccacacgtgccctgtctctgatttccccaccatgcatctcacactcccaccagggcatgaaaaccaaacagcttgagagaaaaacaagtggacatgacaggtggttgaaattaaaaatattcacactcactgaaggaaagaaggtttgaaaaatgtatgcctcagccgggctcagtggtgcacatgcctgtggttccagctacgttggaggctgaggcaggaggattgcttgagcctaggagcccaagactctagtggactataagcacacctgtgaatagtcactacactccagcctgggcagcagagtgagaccctgtctaaaaaataaaaatgatgtgaatgcttcacagtgagaggtgtcacatgctttggatagtaattgttttctttctttgtattgattaaacactttgtttgaaaaatagggttgtagccctggatactatcgggatcataaaggcttgtataccggacggtgtgttccctgcaattgcaacggacattcaaatcaatgccaggatggctcaggcatatgtgttgtgagtaaattgacactttaatgctatcagcagacaatctgtttctcctccattcccctgtactatgcccaaagacatcaacattacatctcccgccaaaccctaaatagaggtcgctgtgtaaatatatgaggctccattatcaggctgaattattttacatttcattttctcctccattttaacatgcaccattaaaagagcgctgctgtctgagcaattaagttacactttagcttctaaatctctccttcgtgaaatgatagtaatgggtggaccttggaagttaactcttgccaggacaaaactaatccaagccactactttgggtcccaattttgttggggcggcaggaagttacaggagtggggcttgttgctgtcagatgtccagtaactcaagaaagcagccagggagaaggggatttgaggagggctcaaggctcataagaaatcagtccaacattagctgggcatggtggcaggtgcctgtaatcccagctactcaggagactgaggcaggagaattgcttgaaccctggaggcagaggttgcactgagccgagatcgtgccactgcactgcagcctgggcaacaagaacaaaactcggtctgcattccatccacccccacaccataaacaacaacaacaacaacaaacagaaatcagtccaacacaagcttcactactgccaagacagagcggggcttggagaagacagatgagggaggtcgtggggaagggaaagtgctgctcacccctcccgtcctcacaacatccaccgcctgcctgttccctatattgactatattttctcatggcctcaaggctgtcttggatgactacagcatatccactggaacatgatcttattttggaatattttataaaattcttctacctaaaattagtttcttaggaaatttttcttatgcatcctgaagcagaaccttttttattctgcttttttcttttgtttcattagagttcttcttggtaaccagggcctccccagtgaggaaaatggacagtgaaaaagagggagcatactccaggaatacagggcttcagttgtgttgtgcccttttggaaatgcactcctctggcacaaattttctttgtattgtgtaatgcaactagagtgtgtttcaagtatgagttcctagaccgtattaagctcgttcaccgtggcccagggaactgcttcctctgcaagatgggacaggctagaagaggaaattgttgtgaagagccaactgatagaatattttgttggattgtaatcttataaattcaaaaagagtaaagggtattgggaaatactgttttccagctcgttagtattcctatagaatagttcatgtttgatattgtatgttttgtgtaacacgagtagatgctttaattaagaataaatacgttggccgggcacggtggctcatgcctgtaatcccagcactttgggaggctgaggcaggtgaatcacgaggtcaggagttcgagaccattctggctaacacagtgaaaccctgtctctactaaaaaaatacaaaaaattatctgggcgtggtggtgggcgcctgcaatcccagctacttgggaggctgaggcaggagaatggcgtgaacccaggaggcggagcttgcaatgatggcgccactgcactccagcctgggtgacagagcaagactctgtctaaaaaacaaaacaaaacaaaaacaaaaaagaataaatatgttatcagtgaaccattgccagatgtcaagcccatcttatgaaagctgccaaagaacaaagggagggtttttttctgtagtcacccactgaaaggaaaacttgtgagagtcataattcatattttaatcaaacaagattttctttcccattttattttttttgtagttctgtcttcacttgtccctaatggccatgtggccgccagagactcttcattcaggaaatcctcactgagcatttgctagtgtggcaggtactgagctaagtgctggagttaaaaatcatcagacctaatccctacactcacgaggcttgctgtctagtaggcaatgtgtatgtgtgtacacacactcacacacacacgcacacacacacggagcccatgtctgcactcagctaacggctccgtggcaagtcctgagtgctgatgctgccctgaattgtgtccactgcatggaagctgagaatgcattcctcgttctcaaagaacagtaaagaggaaatccagtatatttgaatatcaaacgggccttctggctgatttcactgcaaattgacctccacctctcaaggtccaaagtaaatgtttaacatcaggaccttcacccaggtgcaaatcttcaagatatttcaagaatagactctgaagtttgaaaagataagtagcccaactttttgccagtacagcagtaggtgtccagtgtcaagggcaggagtagcgggtaatgtgggtgccaccgtccagagggacctgcgatgatggcctcctcctatgtgctgagacccccatctctccctcttctcattgccccaatttctccccatattttctcctctccccccaattccccttcctctctactatccccgtcaccccttattttcctctccgttcctatttccctccccttttctttttctgtcttctttcttcatcttccttcttttattttctgctacttgagcccatcttcccctctgcagttgcaatggaatttccaaatgatttatctgaaattcacagctgacatggtgctcctctgaggctcacagacggaaggaagcccacgacccttagcacagtactgggggctctttctagctgcatcccgcccccttgcacttctgccttgggcacgccctttgcttttcattccctccacacactgccatgctattgtgagactgaggttctgcacgctgtgtcccctgtgcctggaatgcccttccctcacttctgcgctcagtgaatccctgtccttctgcggccctcgcaggcagcccctcctcctgctctcgtgggatgctggcacacttgtgtcctattttccacgtgatattgaatacgtctattcacaggactacatgtaccccgagtcgagggaccaacccttctttacatcgctagagcctagcatagttgggcatatagtaaatgcctaatagatatttggtgacaaatggagctaggagagcacgtgccatgggagtggacgtgggcttctgcagcattcgttcatttatttattcacagtaaaacacaaggaacctgaagggaggtgctccaagtttgcaggactgaggacagtttccagggtggccactctcaactgacagtgaagggtttctcacatatttttacgggactttgtcaagcaacacgggttttgacactcttccttgatcctctcctctcacccctgtgaaggaccagtactcagagtgattttagtaggatacggatgtcctcacctcaattcttgcatctgtacattcttgcttctccaatgtgttcagtctcagagctaagtagacacaggactgaaatatatctatacagtcatgttctacttttaaattgtcatttggattaaaagagaaagagaactaaaatggaaaagtattagttccaaaggactgatgtcttctgagagagtcagggcagctgaagactgggtgagggtgagggaagccgctggtgtcctcctcagtcacccgtgagaggactcctctgtggagctaatcaactgcaaggaagattgttcccagtgtccagacctgaaggagtctggacccatagtgcagtgagatttggggaaggaaggattccggataggggtgagctttctgatgataagcaaatgtgaacacgtgagcagcatcctactttaaagcccctccacatgctctgaaatactaatatcttatgtttatagcacaattttatagctgggaaaaaaagaaaggatattttaacatcttagtgttttgtgtaattttcagttactcaaaggttagtgaaggatggatttgctcaatctggacaaactgacggcatttatgatggaagggcaacctttttcattatgaacaagccatgtcttcttgggatataaacgtatattgcttttcccaatctaccttcagatattatttaaaaactcacactcatggctgggcgcgatggctcatgcctataatcccagcactttgggaggccgaggcgggcgaatcatgaagtcaggaatttgagaccatcctgaccaacatggtgaaaccctgtctttactaaaagtacaaaaattagctgagcatggtggtgggtgcctgtaatcccagctactcgggaggctgaggcaggagaatcacttgaacccaggaggcagaggttgcagtgagctgagactaggccattgcactccagcccgggcgacagcacaagaatctgtctgaaaacaaaacaaaacaaaaagcaaaacacaaaacccctgacactcattaaagtttcctactcaagcaacacctctgcatacagaagtaaaatacataggcaaatgtttaaaattatacttattccagcccataaaattaacacaaagtgtctccatattagcaaatgcccacagcaaggggagttttcctggatgtttctgtgcatttagatcttttttgctagggtaacaccaagaaaataaacaaatttgacccaatccactaggttttgtctcaatagaccacttggttgcaaaattatttcatctcaacactttactgaagaacaaatttcattagacagcaactttgatgtgaaaataattggatttacataaataaaaagcttagataacattaatttcttgcttctttgggacactggaattcagttgagtattttcttcagatactgtgcaattttttattgttttaacaaattctgtgttaagaactcatttcaataatatcactcttcagtatatcattgttaggtgaaccgtgaagtaaaatgagggtaattttcatcaaagcagtgctaaggggaagaaagaaaagaatttacgtttcccaagagcttagtacacttgcttttttaaatcctcccaacaggcttagaaagtgggcattatcctaactacattttgagaaaattataattgtatgtaaatcatacactagtaaaattgatataagtaaaattgatacaattgaaaggatcttgccccagggctccgtggccttgagatgctggagtgggatggggactcagctggcttgtccccactatgtcacgctgccaatgttaagcaccgcgtcactgagggaaggacacttacccctcttttctaacaccagcaatgattagagggatagggaaaatacatggttagaggagctgatatcactgcaaagtcagaggacttgagttgtagtcatgtgactaagtaagattacaataatctcagaagtagggactgtactggctgctgtgaattgtgctgttcacctgtccccagaactgtcagcacaacaccgcgggagagcactgtgaacgctgccaggagggctactatggcaacgccgtccacggatcctgcagggcctgcccatgtcctcacactaacaggtaccgtagcagcttgacataacctacagggacccaaagtcgtttggtggctgcctaggactaggggtgggagagcaggtggggagaatgggaagtgattaccaaagggtctgggatttctttttgaagggatgaaaacattttcaaattgattgtggtggtgtttgtacaattctgtgaatatactataagccactgaattgtacagtttacatgatgaattgcatgatatgtaaattatatctcaataaagctgtgatattaaaatgaacaaacacgacatacaagaaaacaaatgaataggccgggtgtggtggctcatgcctgtaatcctagcactttagagggccgaggagggcggatcacttgaggtcaggagttcgagaccagcctggccaacatggtgaaaccccgtctctactgaaaatgcaaaaattaccttgtaatccagctattcgggaggctgaggcaggagaatcgcttgaacccaggaggcagaggctgtagtgagccgagattgtaccactgcactccagcctgggcgagagagcgagactccatcttaaaaaaaaaaaaaaaagaaaacaaacagaaaccgtctttccaagttgtatacttccaggcttttcctttccctcttttcttttactgttcattcagtggctaagcagctacttttcgagcacccatgacagggccaggcctcagccctatctatgtgatgaggaagctgaaggaagaagacagaggcagtccctgttctcctggggcttgacctagagtgtggcagggagggagagaaagggtgggagtcatcacactcaataaatacacacactaatcagtaagaggtataactggagatagagatgacattttctgcaataggctgtgtcactgacagtgagggggtggctgctttagaggggtggccaaggaggcctgaagttagaggaagccatggcagtattttggccacgaggctcctagacaaggatgaaacagaaggaaaaggcctgtgacaatgtgttcaagggcagtgagaaggcaggagtggcagaagtgcagtgtgaagagggccagaggtgaggttggtggagcaaccaggacccagatcctgcagaaccctgcaggctgtggtcaagcatctggatcttatcctcagtgcgatggaaattttggggcagttctgagccactgagtgatctgagctctcattcagcctccagagtgaccaatagactacataggtaggaatccaccactgtgttttcaaggtaaccccctctctccttaagtgtggcactttgtcatatccttactcatcacaaagggttcactgtgggcccaagcaaagaatgatgtaacaaactaagtgaagcaagagttgttctgaaaatcaagaagatactgagaacatctcactagtacatagactcagaaacaagtgtggatcacaaaggcaggcctatatcagcccttaacagacacatgggccaagtcctaacatcaccagaagtcatgtgccaagtgtggcttctctggagagacctatttggaatgctcaccctgctttgctgtctatgtctttgatgctcgtgaagcccgccccatcctgcagctttatttgtcaagggatcaatcacatgagcttgcccagacttgtttgaagagaagctggcaaaagtagaaagcagcgagatttccactggggtgcttggaaaaagtttttcattttcatttgcaaagcgtagtagcatcaaggtcagcttccagcttccataagttgaagtaacacgtaggtctttgaatttatcagtaaaactctatttgtatctatttctccttcctgcaatattaatagtgctgaccaatgtctaactgtcttttgagaggcttcctaaacaggcattctcttaccagcaaatggagtgatattccctcagatgtcatcagtgtcatgtccagtggcagacaacagggctttttcatggtctctttggtgtgtgtgtgtgtgtgtgtgtgtgtgtgtgtgtgtgtgtgtgtgtgtgtgtttaaagctgcttctaaaatatcatcacttattgcttctcagccttttggctaaaatcaagtgtaaaatatcaccactttagagctaaaagaaaagggatcaaaattccacaacttggtttgaaaaaaaagtgagaatcagcaatgattgtgcccacagaaatgccgaggcaggcgagtggtctctgtgcatctttagggggctccagggcctggcctccccaccaacttttcttcccagaaggcaatgtgcctgatagaaaagaactagaatcaacaaggagaacgtttttttttaaagaatcagaactctctgttcttttttctgcctagacttgttttactccttccttgttattcctggaaaaatgctgttgtaatcatctcttccaaagtgagttactctgctctgtcttaaggggaaaaaatgctcttccccaaggaacaaataaaataaatgccttcagtccttgttcaccaaaattgccctgtgtcggctgagatcattcatcattatctctccaagtcttgatgggcaaaattttcttcacacaaagtaaccagaccctgggtttcagtgctcacttaatacaagccagtcctttgtggtaaaaaataagcataaatcctatcgatctgtgtttttgatggggcctttttctgtcttctttcaagctttgccactggctgtgtggtgaatgggggagacgtgcggtgctcctgcaaagctgggtacacaggaacacagtgtgaaaggtaaggtgggcgcccctcccgcctcagcctgcagagggggcggggagggctgtgggtggggctgccaggtgctggcacagagctaggggtggggctgggagtttgactgaggcctggaaaaaggtctcttgggaaaaatacaagactgctcacctaataaatcattaatatcattctctttcctgctttgtacgtttcagaaaactgagaatgaggcacaacgcatacactcacccacaagtagctctacctacatccccccaacacgcacccctgtgtacctcaacccccgacacctccctacctacccctcctccacaatgatctctgcataccccctatttcgacatgtcccttccacatatctccacatacacctgccctcaacgtatccctacttacctgtacacatgtacaactgtctacactcttccgtacacacacatatccacagccctagcctagatagcccccccacccccccacccccacccccaccccacacacacccctctatccccacactatattttgaacactttcaggacaatctatgtcttgtttatttcggaatccctggttccaagaatggtactgttcacataataggtgttcggtaatgtttgtgaaacaaaataataaatgttgtggaatggaaactgtaaaattaatgacaaagggctgcagaaccaagctttagttattcatggacaattttcatgattagccactatgcataggacactgccaagtactgagaaagatataaaagatacttataacctagctgagaagaaagcacacacatatttgggaaagtaacagtatgaaaaatgaatcatatggtttacatattttaaaatttaaaataactttctcataaaatcaatacatatttattataaaatgatgaaaaacaaacgagcagagaaccagtgagggcccccctacaacctagccctgtgcactcaaacgctttcacatacaatcctattcataatcattttgtctacagaaagccactgttaaaaagctggctgtttgttcctacaaatcatttctaaatgtgtgaacccttaaaaaaaaaagtagattcctgttttactttctgttttgacttgttttcttatctaatactatgttagtaatatctctccatatcagtaagtattcactgataacatcacatcaatgaccaaaaatttccactgggtttccattatctcctactcttggtcttggagatccttttactgttctgcatttaaagcaacactaaaattaaatccttgcagcttaatatttgtgtatgcatatcctcaaggtataattgtaaaagtggattctttgggtcagaggataggttttccaggcttttaatactttttgcaaaattgccctccagaaaagtttatattcttacagcagcaaaagagaatgagtgactacctaccacaatggatattggaaaggatcaatattttaaatatttgctaattagggccaagcatggtggctcaaacttgtaatcccagcactttgggaggccaagttgggaggattatttcatgtgatccagaggttagagaccaacctgggcagcatagagagacctcatctccataatttttttttttaattagccaagtgtggtggtgtgtgcctgtggtcccagctacttgggatgctgaggtaggagaaccatatgaacccaggagttcgaggctgcagtgagctatgatcgcactactgcattccagcctgggcaacagaaaaaaaaaagccaatttgatagagaaaaattgtgtatcattttaatttacattgttttgtttaaactttaaaagagtttgactaatttttgtttaaccggaaaatgaattcaaccagatttcaagtaaggcataaccaccctagactggggttatctgaaatgtttatggataaggtgggactttggtaggtccaaggggttactagaacccagtggagccagaagatggaagtgggaggcaggttaggttggggaagcaaggcagaaaagcccaaggggctggaagacacttgccatgtgtaggaggtggggactgccttagactggggacactgagcagcagctaaggagcccaattctatggcaaaagatggtaatggaaggttcttctgttttccattttccatttcagcaaaaggagcatttctcacacttgccttacacttattcagttattctttcaatgaaaaatgtatggaggtcctagtatatatatgtctggcacagtgctaagtactggaggcacattaacaaacagcacagacagtgtcctcaagggctttccagtccagtggtggacagacatcaaaacatgccattaaaatagcgagagatgggagaactgggctaagttgagctgcaattaggaggtatatccaaccagcgagaagggaaggatgtggggagtgggaaaggattctaggctctgaggtttaaaagccacaggggaccaacacctgggagaggcgtcctaatttcatcctctttatggctcttcacaaacaatgaagcattaaacagcaacaggctcggtgagacatccatttggcaggcaaaatttttaattaacagtacttctctcagctgatgtttgttatatctgatgtctcaagaaaacaagctattatttctttaaaaaattttttgaagctttttcatggataaatgccattttatgtcaacatttttcatttgttagacacagcacccagacatcattcctggcactagtgattaactacacaatgataaacacaaggacagtcaagggtgaaaagcaggaatatagattatgcaggagactagctggatagaagccagagtggccagctgtggggagggtttcgcaaaggctttccagcccatgcatgctcttacccctcttctccctcagacacacagggccacacaagacaagcctattttctgctctttatttgttgtaccaatgtcattcgtgaaatcaggaggttttacttcagtcctttgggtttagccactgccataaattgagaataagagaaccagttatttcttataaccagtaagtaatgctttgcaagagtaaggaagaagtagaatcgaacttcctgaatatttctgtgatttaaatataaggtactttgtaattatgcatctattacatgggaagtttagatgtaggtaagaaagacatcaaaaataaagtattctagaacacagagcttctgcataacatgatctgttaggtagaataccaagccagtcacaaagtaaagccctattattagtatatgaccaccctgcttagtagacttaaataggccacctcagcctagttaccttctggattattaggggatacatgggccttctgctttcttgtaataatttcaaatgatgccaattagaagatgaatattttgtcatgtcttattacgatagctacccttcattgtctgttatgtgcagatattacgctagattctttattacattatctcatattcactgagcaaaataggtattattagtccactcacttattcattcaacaaatgaatgaatatgtgccaggtgaccgtagggatatatcagtgagcaaaacagcccaaaactccacatcttcatggagcttatattttcatgggggctgtgggggggaccggtaaagaaactgaagcacagagggttacagcaacagcccaagatcacactagtaagtagtagagataggagtccagccagatcttactgatcctttacattatatcaacagtgtatccatggtaatacattggtgaagtatattggaagtacatggtaacgtgtattggaattgcctaattttttttgatgcagtgcttaaatttggggaaatgaggtaaataccatattcccttgagtctatcaagtcaattgatgataagacaccacacatcagtttaatgacaatttgggggtgactggatggggagtggaactttattaatggaaatattgtaattgacatcccaactccaggagcatgaatatgtgcttatttgactttaaaaaaaaaaaaaaatcaaagaatcaaggaaatgtgatctttaaacttgtaaaccagtaatgagttctcattactatactatctagaataaaaaaggctcagggccaaaggtagcagctgtaactgctctcagttgtttaagagtcattatatacagcacggcagcaattagtgcaaatatgaattatgcagacttgacatagtgcaggccaggtgcagtggttcatgcctgtaatcccagcactttagatactgaggcaggaggatcacttgagcccaggagttcaagaccagcctgggcaacatagcaagaccttatctctgctaaatattaaaaaattaaccaggcctggtggcatgcacctgtagttccagttttttgggaggctgaggcagaaggattgcttgagcccagaagttcaagaccagtctgggcaatatagcaagacctcatctctactaaaaattaaaaaattagccagaaatggtggcatgcacctgtggtctgagtttcttgggaggctgagacagaaggattgcttgagtgcagaagttcgaggttgcagtgagctgtgattgtgccattgtactccagcctggagaacagagtaagactgtcaagaaagaaaagaaagaaagaaagaaaagagagaaataaagaaagaaagaaaaaggaaaggaaaggaaaaaagaaaagaagagaagaggaagggaagggaggagggaggggggagggaggaaggaaggaaggaaggaagggagggaggaagggaggaaggaaggaagaaaggaaggaaaggaaggaagaaataatgcaataggaaatattaagaaactcctccctcattcaaaaaattggaaattacatggatcttacttcagatttatttctgtgagacaattcaaggggtaaatacctctgtattgagaaatattcattcttgcagatctatgtcggtcttccacccattgggttacaatatcccaaacagagagctagagattgagaaaattggttgagataaacgatgagttatttgggtgtttctcctcctctctatattttgtgtaggtgtgcaccgggatatttcgggaatccccagaaattcggaggtagctgccaaccatgcagttgtaacagcaatggccagctgggcagctgtcatcccctgactggaggtaaggccgacccacacccctgctaacttgcatttataaagctggtataacttaacagcctaagaacccaagcacacatcttcaggatgcataatacacaattccagccagcaagctgtccccaggatgcataatacacaattccagccagcaagctgtccccttgttttgacaaacctgggaatgcttagatagtattttcagctttggtgaataacctgtttcaatgcactttttttttttaaaaagtgaattgtttttgaaacttacctaattataaccaaaataacttcagatcctactttggtgattttgctgagatctccctttgatattgtagggttattgtctcatcagctttcccgtgtgtgtctgaagaaattgaaatactctttatcttacagcagtacatgttctgggatgtgggtgggtaattggggtggattttatacaccaagaaaaagataattagcagaagttagtatggtttattaggagcaacttggaacaaaaaggaagactatcctcttccttctttgacagaatattaataggattaatcaggaaaatgctattgatgtagtgtgacaccaaacacttagataaaatctttcatcttatatttatggacaagttgaagaactaaaccctggatatgtggattccagctggtcaagtgactatccccaaaggaatgcagagtaaatggattaatgccagtctagaatggggtatttattgtcatgcctcaggacttcatccttggctccacattttttatttggatggaaatatagaaagcatgcctacccatttatcagatgacacaaagttgggaagaacagtaaagggaccaagggaaaacttccccttcacctacagaaggtttacagaaaatcagtggacaaaaggcagattaataggagaaaaggcgtacacaattttattttaatgtgtgtaacacaggagaatcacaggacaatgattacccaataacccagtggggcacagatgcttatgtacccttcttcttaggggaaagagagatgcggaaatgtggatgattttaaggggaatggtaaatgatttttaggctgactcagtggactcagagaacatatagtgaggcctgggacaaaatcttttgggcccacagaacagacaatggtttgtgacaagagtctgtccaggtgtgttgacagacttcagtctttctccctgaaatatgagttaaattaatgaaaactcatggaggaaaccagaagtagtttgttttcatttttggcaagtctgaatgttgggaagataagtgggtatcagagtaaagttttttccggcatctgctggtctccaagggccttcaatttaaaataatcagcccaccagggtgccatattttggggtgaaattccctggtcttctccaatagtaagtgcctcccatgacattaagaattcagaagggcctcaacagtctagaatgatgggccaattcaaccagacaaaatgatgttaaggataagggtgtggtcctgtagttgagtggaaaaaataaataaacctttagctatgtgataagtggtaactggcttagtagcaggaggtgtaaaaaagcttaaggttgtcatcagcagtcagtgcagggtaggttagagtgtggtgtggcccctaagatagctcgtactgtcttcactgagttccattgtctaaagccggggtccatggcacactgctcatgtaagtcctcacgtgagagttagttacatctttagaagacaatagaagagctatagttgttcagaaagagagtaagactctgaagggatgtggaactgtgtcacacgaggaaggattgaccagggcagtgaaaggaagagctggaaaggacatgtttgttaggctggcgtgtgggaaagggttggtattgttctctgagacataagggacagaacttagagcaaagagtagaagcaagaggaagctctattttaaatgattctaaggaagaagtgtctaatgcttaaagatgaaacagattgctttaaaaggaggcaatttctcctgtcactggaggtattcaagaagcttcaacatcacgcacagcttactcgccagactaatgcctctgcaaccctcatttcccccacgccagtaacaaaaatcagcaacatgaaatgaggatagtaactatttgttcccaaaatggaagaaaatgcttatgtatgagacttgcttattcctgttagagttttgttgttgttgttttttattctttttttttttcttcaactaataagggacacattccttggtggtcaaaatgcaagcttgttaggaaaattccactaataaatcaatcatccagagaagcctagtcccccataaactattcaggctgctgttgaaaattgtcaaggaaacaagaccatgcttgctggccagaagccatttacaggctaactgaggaaatagaagtatcacaatatatacatataagagcaaatggccgggcatggtggctcatgcctgtaatcccagcactttgggaggctgaggtgggtggatcacctgaggtcaggagtttgagaccagcctggccaacatggggaaaccctgtctctactaaaaatacaaaaattagctgggtgtggtggcagatgcctgtaatctcagctacttgggaggctgaggcaggagaatcgcttgaacccaggaggcagaggttgcagtgagctgagatagcaccactgcactccagcttgggtgacaagagcgaaactctgtctcaaaaaaaaaaaaaaaaaaagcaagtaaggctttttttaaaaaggaacccatgattatatataataaattaaaatgtatataaatatttataaagggaacattgtctttgagtggcaggatcaaggatgatgcttttatttcatttttctgacttccccatattttccataattaatttatattattttttacaattaaaagtaaatgtggtttaaaatgtctgtatatacacacaaagtgtggaatattattggctggtgagaataacagatgtgaaagcctcttgtagcttgtccaggaaaatgttaagcatagagttttgctgttgtgaaggtagatagtttgttcagggggaagtgagaggacatgtcaatgtcagaatgcatggcatggggaaaacagtacatgtggaaggggtcaagaatgcccagggttgaccagcaggctttactgtagctgagaacctcaaaactcagcttatccagcccggccaatatggtgaaaccccgtctctactaaaaatacaaaaattagccaggcatggtggtgcgcgcctgtagtcccagctacttgggaggctgaggcaggagaatcggttgaatctgggaggcagagattgcagtgagctgacatcgcaccactgcagtccaacctgggtgagagagtgagactcccccctccccaccggccaaaaaaaacaaaaacaaaaactcagcttatatgtgctgtagttggtggtgtgggcccactgacattgtatgcccatcactatcaccacatctgtcacactgttttgtaacttgtctgccccccgtgtttcatgggactgttaagtcacagagcagcagggattttgtcttgatatctttgtatttccagcagctagcatggggctctgttacactgtaaatgctcaaaggtgctcagtgaatgtttgcacaatgttcttgaatgatgccagaagcagcatgaacatacaagaggctcttcaatgaagaaagccctaatgcgaatgatcgagacgtttgatttgataagaaaacatggccctttatagagttgacctttgtagtgaaggaattgaatatataacagggaggccacaaaagcagttcctgcagcgagcctgctgggagatgagaaggcttcctgggcactggcatgggtgagggagggaaaaggaagagctagcgatgctgggtagttgggtgtctattaggttggtgcaaaagtaattgtgggttttgccattacttaaaatggtgaaaaccacaattacttttgcaccaaactaataaaactttgcaaaactagcttttctgaaaaccaagttaaagagcagatgaaaagtaagtttaataactatgtcttctttggttattttctgattttagactgcataaaccaagaacccaaagatagcagccctgcagaagaatgtgatggtgagaaaagaaagcccctcctcctcctttccaagttgtggggtttggtttaagatatgtgagcaccatgctgggtcatgcagtttccagtctgggaaagtaagggtgggaggaggtggaaggactacttagggtcaaatcagcttctctctgtatgaccttcagcaggggaccctgcttctccaagcctcagtttcatcatttgctaagttaacatgataactagacctaccttatagggatattagggaagtgcttgtaaatgtcttatcacaatgcctggtaaattgcaagcatcccatagatgaaggctattattattttccttatgtgtaaagtaagcaaccagttgcatggaatctccatttctaaaatgctccctgtgcacagggctctccttttttcagaatccacatccatccctgagaaggccagggctgtggttgtcacccgtgacgatctgcgtgcatgccaactgggctgcatagcacttgtggtcttttcgcagtcccacggctccccccacagcacatttgcctttgattgtggcccctacagattgcgacagctgtgtgatgaccctcctgaacgacctggccaccatgggcgagcagctccgcctggtcaagtctcagctgcagggcctgagtgccagcgcagggcttctggagcagatgaggcacatggagacccaggccaaggacctgagggtaaatcccctgcggccgagagtagacacgtggggaggagatgctgcgggagtggattctccataagcaggaagggaaaggttgactcctggaaaggctcaggggttgtcctccttcctctgatccaaatgaagataagacttttcctggtggaaaatcatttttgtgaacacacaaaactagcacatctgggtgaacaatacttactgaacatttccaggtgagtttttctcatcgagcctttatttcagtatcttgcattcagaagactcaaacacaggtttgtgttaagttggtattaactcttctttaaatgttggatagaatttttccagtgaagccatgtgagcctggaattttctttgttggaagttgtggtttttgaaaataagccatgaatttaattttcaaagaataggtatgagactacagtatttgggctatgtgtttcttcttgagtgatacttggtcatttgcacctttcaaataatatgtcaatttcatctaaattaccaaatatattgacataaaattgttcataatgttcccttattatcctttgtacatctgcaaagtctataaagatgccttcttattcattttctgataatgataatttatgacttatctctttctcttattttggctagagtattaccaatgttgttgatccttttatttcattgattttatccattgtttatctattttcaatttcattgatttctgttcttatcctttttttttccttccttgtgcttgctttgggtgaaacttgctattcattttctggtttcctaagcttattttactgattcaaaatctttcttgattctaacgtaggcatataatcctatcagttttatcactaagcactgctttagctgtatcccacacaccttgcaatgttatgttttcattctcattcagttcaatggattttctgattttccttgtgacgtatctgtaacccatgtgttatttagaaatgtgttgaccaggcatggtggctcatgcctgtaatcccagcgctttgggaggccgaggcgggtagatcacttgagcccaggacttggagaccagcctggccaacatggtgaaactccaactctactaaaaatacaaaaattagccaggcatgatggcacatgcctgtagtcccagctacttgggaggctgaggcaggagaatcacttgaaccccagaggcagaggttgcagtgagctgagatggtgccactgcactccagcctgggtgacacagcgagactccatctcaaaaaacaaaagcaaaaacaaaaaacaaaaacaaaaaagaaatgtgttgtttaatatccaaattgggggattttccagataactttgtgttactggtttctaatttaactctttcatggtcagagaacacgctttccatgatttcagtccttttaaatgtgttgaggtttgtttcattgctcagaatgtggtccatttgggtgaatgctgtatgtatacttagatggaatatggctgagagggtatcctaagaagtaatagaacctatttccctgaggggaaataggggatgctgtgcccatgaatgggggctaaaaagcagcctggaagctgcccaatgctcatcgttgggtgatggccacatgagagcctagcaaagcttacaggggcaggacaaatctacagacctggatctatgctggaatgttacatactctcaacgccactatggtatataaatcctaaactgccaaagtaagacctggtcctagaccgtgggttggaggttcgagtaggggtggtgataagcataagagcactagacagggcccagagagcacaaagaaaggggaactcccacccagaaagagcctgcaaacattgttagcagagaagtaataagaaagacacccaacagaagcaacagtcaagagatgagttcacttcggataaaatgaaaacaacaggacaatctgaaaatgactttgcagaatgacacccaatagaaggaacaagaaattaggaaatttgagggggaaacctccagaaatcaaacaagaagaggtagataggaaaagacccaattgaaaatcatggaaatgaaaaaatacactcattgaagtaaaagaattcagtagatgagatcagctctagtctagacacagtgaacaaggctttggggaaagtttaataagtacttttgggttgagggctgattctagtgactatagctgagtatatatagcaaaagattattctagaaaaatgactctttcctatccttttgcataactttagtccaaggtttataggcttaatatggagaagaggagggaaaagcatttatgtcttgaggggaaaaaaaaggaagccactggcttgcttggatttcatcaacatggccctgcagccttcaccattctgcacacacgctgtttgccacaccctgtgctaagggctttactcaagtctcacaacctcctcatgaggaacctagtgttgttctcattaaacaggcatggagaagctgagaaacttgcctagaatcatggtggttctggaagaattcaaatcaagatcaaattctaaagaccatgctttacccactccacttcttatccaggtgttctgctgacaatctatataatgacttgcctccctttccccaaagtaaagttaaaatagaactatcttcttgctgtatcacacaaacatgcgaaaattaagaaagattacgtataagaagggaagtaacatttttgaatgctcatatgtacatgacattttacaatacattagctcgcttatcaccaaaaccaaccctgcagctaaatacgataatccccaatttactaatggaagagcaaggcttagtgaggctcatctatcatgtggcagactaagggtttggacctaggctttatttaaagcctgtattcttttacccaacactggttctgacatacatattgaggtaataatatcattttttcctataaactttttcaatatattaatactttttccaaaaaatggaaaataatcaccattctagatattacgtgcagtagtgtctaagggtctaagagtaatgaggcaatttagcctaaaaaaagggcaagggacccggattatggtcctgaagcaatcaccgatgagctatacaaccgtggacaagtcacccgacttctttgggcttccattttctcagttgcaatatgaggctgttcagctacaagagctctgagttccctgtggttctgttggacgagattctttgaatagattcttaatgattccttcattcaagtagccatatgcactgcttttagtgttgtcaggttaactgcaggtttttaaaaaactgtatttattatagaatctggaaattaatcaggtaagtagtatcaccctcatttctataaggttaggtcattaattcaagtgaagtagctcttatctcttcacatttgtcacatttgctactttattttagagccatatcacaatgtacatcagaaaatagattccttatgtaacctatttccaagaaccacatttgtgtgtgtgtggaactgaaaatggtcttgccaaatgattcttcatttataaccctgttgaccaggttgataggacttagtctttatactgtaaagtgacattcatttgtgttttgtttccagaatcagttgctcaactaccgttctgccatttcaaatcatggatcaaaaatagaaggcctggaaagagaactgactgatttgaatcaagaatttgagactttgcaagaaaaggtaatgtgttaggtccatttaactttggggtttttttgctttcaaagtatttttatttttccttattgacttaatttgctgctaatcaatttatttttcatataggctcaagtaaattccagaaaagcacaaacattaaacaacaatgttaatcgggcaacacaaagcgcaaaagaactggatgtgaagattaaaaatgtcatccggaatgtgcacagtaagaagagttattaagcccaattacattttttttggttacataaccttcattgtacactaaaagaattccctttaagatttcaacattatgaaaagaatcccatagtgatactaaaaaactaatataaaatctccatagaagtttctacctttttttttttttaagtagcctactggagcccagaattcccagtctaatagaccacttgatgtttcctagttcttttaaagcagatctctgggacagatggagagggaaacaacgtgccttcaggtgacttttccagagagtgggctgaagcccagcgcatgatgagggaactgcggaacaggaactttggaaagcacctcagagaagcagaagctgataaaagggagtcgcagctctgtaagaatgctcccaaattcttgcatccagtccattctaattgatttgaaacacaacgtgcagagtgcaatgtagagttccccgttataggtggaaggcctcatggtttcagcgaatattactgttagagcatcacgtggtgaaaattggtagcccccaggagtcccaggttaccaacgggctgtagaatataacagcttaccatcatgcaaagaaaaaaaaaaagttcttctaaaagttagatatggttgcctctttttccttcttaactgcatttttctgatgcttattcacctctttccagttttctcattacatcattattaatggtcacctcaccactactgaatttttgaatcacaaattgatattagcactactacagattgagtttccctttccaaaatgcttgggaccagacgtgtttcagatttttgatttttttggattttggaatatttgcatagacttaatgagacctcttggagatgggaccccagtctaaacataaaatttatttacgtttcatttacatcttatacacatatatcgaaggtaattttatacaatatttttaataattctgtgcatgaaatgaactttgtgtgtgtgtgcgtgtgtgtgtgtgtgtatgtgacagagtctcactccattactcaggctggagtgcagtagtgtgatctcaactcactgcaaccttcacctcctgagttcaagcggttctcatgcctcagactgagcaatagctgggattacaggtgcctgccaccatgcctggctaatttttatatttttagtagagacagggttttaccattttggccaggctggtctcaaactcctgacatcaagcaatacgcctgccttggtctcccagtgtgctgagattacaggcgtgagccaccgcacccagcctctgaaatgaacttttgactgcattttgactgcaacctgtcacatgaggtcagatgtggaattttctatttgtggcatcatgtcattgctcaaaaatgtcagattttgaagcatttcagattttggctttttagattagggatgttcaaatttgtattacaaaaacaaaaaaaggatatactagaaattaacagaatacatcaaaaggttttgactagagaaaatgcctcgttagttcaaaactgagaaatattagtttagtgcatactttttacagatactggtatttattctttaataaaatgatgtatcagtggttaatatacagatactagcagttttcttgcttaaatttttattgttcaaatttaatatgagtcttggcttttaattgtaagtaggcagtattcacagtggaaggagcatgcactttaccccctgcagccagctcaagttcaagtcctaagcccgactggccatgtaaccttgggtcagtcctctcatttctcaaggcttccatctctttatctaaaacatgagaatgataatttattgttttcctgtggaagttaaatgaggcaacatgtacagtgcacatagcaggtctgtgtcaatgtgagtttcctttcccatcccctccaaagttcaaggaaaaccatgaaatgagtagaaactcgattctccctttgtagtttttataacccagcttcagtatgctcatctgtcaaatagaaaacatgaggtgatgtattacagtgctgaaccggataaggacctggcagaaaacccaccagggggagaacaatgggcttgctaacagtatccgggattctttaaatgaatacgaagccaaactcagtgaccttcgtgctcggctgcaggaggcagctgcccaagccaagcaggcaaatggcttgaaccaagaaaacgagagagctttgggagccattcaggtgagttcacagtttgaagttgcacactttcgttaataaggatgagagaagcagggatctttattattaataaagtggcatagccaggcacctgtctgtacatctcattataccacctcagacccagatcagacaggaacaaagcgttaagtgcaaaaccatagttgtttctagtcttcagctaccagaaaagattctgaacttaaaccacagacaaagcagtgcaaactgcttcacctgcatccccagctgaaagagtgttggaggaataatgttgccaaatagatgagaaattaatattgctataattaattcaaagtatatattatgtttttggtaatttactttttgtgtcaaatatgtatactttttaatgaacataattatcataatcaccagcaaaggcattttaagccataatctgctttataggaaataaaagtacaggccacctacagaagctgcaatgacagaatttagagctctggattttgcagttcatatatacatatatttggcgccaccacgcctggctaatttttgtatttttagtagagacggggtttcaccatgttggctaggctggtctcgaactcctgacctcaggtgatccactcgcctcagcctcccaaagtgatgggattacaggcgtgagccaccatgcccggccttatagttcatattttaaatagtgaacattgtatgctaaaacaatgaggccaggtgcaatggcttatgcctgtaatcctaacactttgagaggccaaggcaagaggattgcttgggcccaggagtttgagaccagcctcggcaatgtagtgagaccctgtctctacaaaaatttttttaaaaattagctggtcatagtggcatgagcctgtagtctcagctactcgggaggctgaggtggaaggatcgcttgaacacactggtgggttgggagcaaggctgcagtgagccattatcgagccactgcacttcagcctaggcaacagaatgagacctgtctcaaaaaaaaaattaaaaacaacaaaaatatgagcggttttatagggttacaaaacaacagtaaaatcaaaattgaataacacagggcagaccccaacacaggaggaagttggcaaatgaaaataaatgatgtcttagtggatgactccatgcttagctcccaaagcctctttggatagtaccatgtctgtgtgaagttgctgattatgccaaggtaagggagcagacccaactttataggcctctgaactctggcagccttccagcctggcattctcaggttccgtgtgacctctcggtcaagtgcctgctgtgttctcattggtactggctgatggttagtgatggtttatttacataaaatcttttggtctgtttcacaaaccagattttgataatatacccatctcattgggcaagttgacccctactgtagaaaccttcttcagcagtgatagcaattgtttcattggcatatcatttaaggaaactatggtgacgtacctccactacaaaaagaactgatttcctatcactttgtaattgcctagacaatgttcaggttcaagaaagcattctgactttgaaattacgtatatgctattgtcccataaatttgtctatgccttctgataatatatcatagagctcaagcaatttttttttattttctccagagacaagtgaaagaaataaattccctgcagagtgatttcaccaagtatctaaccactgcagactcatctttgttgcaaaccaacattgcgctgcagctgatggagaaaagccagaaggtagaggaaatagttgttctctagaaaaatctaaaaacattttaattatattgtgagaaaacaatgaaatgggctgacctacttttttgtttattcaaagtatagtctcttagatggaagagaatataatgaaatgttaacaatagttctctcttgcaaaagaagtatgaatgacatgtcttcttatgttcatatgtattacctaatttgtccgcaatgagcaaatcacttttgtgatagcaacaaaaaaattataatgctatttttaaaatatcaagcatacaagcatttattaacagaagatatttaagacttgatcaaaactgacacaattttttagcagttcaatggggattttaaagtgtcttttataataactatttcttttttttattatactttaagttttagggtacatgtgcataacgtgcaggttagttacatatgtatacatgtgccatgttggtgtgctgcacccagtaactctttaataactatttctaaatcataaaaaagttctttggtttactacaactttatattgatgataacattgtgcttttgtaaaggttactaaagggtttctcaccataatgagaatgttcaagatagtggtaaaccttggggaaatattaccagtgctactgtctgaagtgaccaaggattaactggtatggtaaataggcttagaaaatataacatctcattgttgccccagaaacacatcagttatgatagagtttgagaaatcagcacctacattctttccttgaatttatactgtctttgtttatttggaaaaaataggaatatgaaaaattagctgccagtttaaatgaagcaagacaagaactaagtgacaaagtaagagaactttccagatctgctggcaaaacatcccttgtggaggaggcagaaaagcacgcgcggtccttacaagagctggcaaagcagctggaagagtgagtgcatggcccaggagaccagaagggcacgtgggctgagctcagcagcttgtcctgagacaagcaaggccctcccctgggttggctgggtctccagaactgggtggagggcggagggtggggtcaaggccaatgccccaggcccaagtcagaagcagagcagcaataagggcactaattcctggccacgtcctttgggcacagctacagaggccatcacctcaggtatccacttaccaaatgaaatgcgaagaggctgggctcaagttgatggcaccactgcagtcaaacctggcagacagagagagactctgccatctctttattttattttgtttttttccatttcttaaaaaaaaaaaagaaagaaaaaataaaaagaagaaatggaaaggtttggggggatgtcagctgctggcagaggaaggctgtggggagtggctaacctgccctgtcttccaggatcaagagaaacgccagcggggatgagctggtgcgctgtgctgtggatgccgccaccgcctacgagaacatcctcaatgccatcaaagcggccgaggacgcagccaacagggctgccagtgcatctgaatctgccctccaggtgggcacctgtaccagcagcttctccacattcgctgtggagatggctgatttttatattttctttccgtgggctccaaggaatagaaacaaagcattattttaaatcagaacttgttgtatagaatagaacttgccctagatatgggtaatttctgtatttgactatttcatgtctgtagcacagttttaaaactatgtgtaaaaccagatagaaattacactgattgtcaattttcaacctgaacaaatattatatcctatatcttaccaggtatgcttctatgctgtgatcattagccaaaaagagatatttttgcaaacaacttgatcagcattttcatcaggtcatttggtcttacatctcggtgtgtctgtggagtcctgtgggatcttatatgcaccatatgataattcctatatctgaaaataaagaacaaaatattaaatatcagagttcagggggacaggccttcttgaatgagtgaagacttttctgtcccaaagcttgaaagcctgaaaacaactaagttctctcctctgttattgtagaggtttttgtacgaatgacagtgagcagctaaaacaagtgtcacataatttgtcagtatgccaccagagataggcccacctccccaagccacataattcacataggtgttagggctacctggagccctaactcttttagggaacaatctagttataactccttccccctttgaacttcatccttaaaattaagggcttcagactaggatagaaatcttattccatatttcgtaacatatagcatttgtttaaggctgttaaatgctttgctttcagacagtgataaaggaagatctgccaagaaaagctaaaaccctgagttccaacagtgataaactgttaaatgaagccaagatgacacaaaagaagctaaagcaaggtattagggggagtgggcaatggcagggatagtcaggagctttaaatgacctctgggaccaggtggggcagccctagaagcaaatgttgtttttgaatctcagtgtcaatgcagatgataccctttatttattttattttattactattattatttttaatagagatggggtctccgttgcccaggctggagtgcagtggcacaatcatagctcactgtagctttgaactcctgggcttaagctatcctcccacttcagcctcccaagtagctgagattacaggcgtgcaccaccatgcccagctaatttttgtattttttttagaggcaaggtcttgctatgtttcccaggctgggctcaaattcctgtccttacgggatcctcctgtctcagcttcccaaaatggtgggattacaagcatgagccaccatgccgggcccagataatactttttaaattcatgatttatttatcaatttcatgtatccacccaatattctaaatattccccacctatcatgtacaaaattaactagagccttataaatataaataaatcttgagagtgataggcctatttgggcctggccttggtggggaggctattttaatttaacccacctgtgatcatggcattggcaaccccacatgtcaagatcattggtttgggatcattagaataactgctttaaaatttcttaagtcctaaaatctttgcaactaaaagtccccaaaatcactgctactgtgaagcatgagaattttttaagcataaattttatctctggaaaattttcatgtattttacttacttatttttttaaataattaaactctctcaatctcaccaaatttctgtgtttgaaaaatgctgtttcttgtgtttctccaggctcttgttgtcatccatgagtccaaggccctcattcagcctcttagtcctttcagagggattaaatgatgcctctgtaaattaaataatttctctcctttctgcttccttcttttccttccttctttctttctctctttccttcacatgttaaaaaattaaagacatgaaaaataaaataccaaaaaagtactaacatacaatcatttgccttgcaaatttcaataatttggatttcctggtatgacatctatttctctctacaaaatttgagcttcgaggtaggctcagtgtgctaaacagggttaggatgctaactatgttgctatgtaaaccagtcctggaatcgtaattgaagccatgaatcatcaagatggtcttaaagcatttgctggtcatttttgatgacccaaggatggcaatattatcagctaggaatgtctgctagctccctttctttcacagaatttttaaaatgtgtcattttggaaattaacagaaacaaacagtgcctactttgtgtctgtatttgcctggatgaggctctttcaacaacactcttttcttgtcctctgatggaagaggatcctttctacattattaattcattcattcactcatgtattcatttactcaacaaacatatactaatattacgcctcaactagtgccagacactacattatgtggtaggacatggtagtggataagacagatgcatcttttactaaacagagtctcttactctgagcagttaagaagtttagccttccccaagttattcagcctctttctttcttcctgtgtatttccaaggcattaccacaaggctctgatttgctgctgacctctgtaactggaggatcccagagctgtgggtctgggcacatgcagtgggcatctctgaggtgacccctaagaagcaagtctactcaatgctgtgcagacactggctacttcaggggccacaaataccaatggaggatcaaaatgcacaaagtaattgcctcctgatgctttattttattttagaagtcagtccagctctcaacaacctacagcaaaccctgaatattgtgacagttcagaaagaagtgatagacaccaatctcacaactctccgagatggtcttcatgggatacagagaggtcagcatcttcctaatccattgtactcggttggcttcttttgttgaacgttttagatacttatacctccctatctgtgtgtgcattaggtgatattgatgctatgatcagtagtgcaaagagcatggtcagaaaggccaacgacatcacagatgaggttctggatgggctcaaccccatccagacagatgtggaaagaattaaggacacctatgggaggacacagaacgaagacttcaaaaaggctctgactgatgcagataactcgggtatcaggcgatctctggccaggacatcttagccattctctccattgttatgtgttttggtccatttccattcttccctggtaaagtctgatctcagaaactaaaacattagaaaacagctccacctgatacaggatatattcaaagcgtatagatatcctgctagttggaaggaccagacaggatttttaatttttagaaaatacattgaaaatgctattggtttgcttttttacaaagtggagatatatgtttctaaatcatgaggcattgaattatgattgatattaagaatcagaaaacaggctgtgttttctgtgcgctgtggctcatgcctgtaatcccagcactttgggaggccgaggtgggtggatcacgaggtcaggagatcgagaccatcctggctaacatggtgaaatcctgtctctactaaaaatacaaaaaattagccaggcgtggtgatgggcgcctgtagtcccagctactcgggaggctgaggcaggagaatggcgtgatcctgggaggtggaggttgcagtgagctgaaattgcaccactgcactccagcctggacgacagagcgagactccatctcaaacaaaaaaaaaaaaaaaaaaaggaaagaaagaaagaaaaagaatcagaaaacaaaggtttttttttttctttctgtagtggtcaaagtaaaggatttggtacctagattgcagaatacaattcaccatgtacagtagttcctccttatcctcaggggatatgttccaagacccctactgggtgtgtgaacccacagatagtaccaaaccctatatatactatgttttttcgatctgataacccagacagctactaagtgactaatgggtgggtagggtagacagcaaggatatgctggaaaaaaggaagattcacatgggtgggaccatatgagatttcgtcatgctattccaaacagcacccaattcaaaacttatgaattgcttatttctggaatttttcttttttaatatttttggaccatggttgatagcaagtacttgaaaccttgggaagtgaaaccatgggtaaggggggaactaccgtaactaattatgacccatcctgttcaacatctggggaccaaacatgccacttgacaaatactgtcagtaagaacatttgtagttagccttttcttaatgcacaatcttacatttctattttttttctcaccaacagtgaataagttaaccaacaaactacctgatctttggcgcaagattgaaagtatcaaccaacagctgttgcccttgggaaacatctctgacaacatggacagaatacgagaactaattcagcaggccagagatgctgccagtaaggtgagtgtgtccccacgtggtcagtggccaaggctagttctttaatgagttatcacatttatcaagaaagaaaaaaacacttatttactcaagaattggttgtctttctttccccaattcttgtgttgcttgaatataaagattgattttctcctgtcatcctttacaagtgtacatgaccttcatccttacattatctggtatatcaggatcctgaagcaatttgcccccattgagtttattcaggcagaaagaaggattttcttccaggccccagtttgtaaactgtaattgcacattcaagggagggttctgtggtcagaatgtgccagtgtgatactgcacaggacctaccctcctattgtaacttgaaagttgtagaatccatctttgctgaggatggaggatttaagatgacagcagttttccatcattggagtactgattcaccagcctttcttgttttaacctgacattatttgcttgaattactgacacttgtctcttgagatttgttttgtcctaaaatggcataaatacaatttcttatattttccaataactcctagacagccctacaggagagttttggagggagagggttggagagcctagtcagaatatcattgccctggaggcatcgtgcccaataaccaggctcactgttacttcttttgagcctcagaatctgccctttcttctaagaaagcaaagtattcccaacataaaaacttgaacaggaaaacaaagagcataaggcaaagtttggaagaacgcaccctcttcacactcatacatgctttataaaaaccaaatgaataagaatgtatgctagcttttacccttctgtgttcattcactaatttatccaacaaaaatttgaagtgtattatagcacagtggttaacagctgtttaaccaagccagactgtcttggtttcaattcttgctctgcctttggtgagctgtgagacctgagccctgtctctttacctctctgtgcctcagtttcttggtctatagagcatagaaagtaccaacctcatgagattgttagggttaaatgagctaatgtggaacagtgcctggcaaatagtaggtaccgtgttagtggaaaaacataaaataaaaagcagtaagtaagtgcttttgaatgcctggttggcattggcacttctttgggtgctgaggacacagaaattattaagtcatagttctgaactcaggctgctctccagccactgcaggttgtttcttagactgtggtaacaagctggatagaggtgtgttatgtgtatcttcaaaacccccagttctacctggagagggtcagaatagcactaataagtagcattaacagacatggataagaatgttcattgcaacatagtttataatcacacacaaagattttttttaaaaaaagccacatttacaatagcaaacctgaatgagctggagctgtgtgtatcaacatgaataaatccaaacacgtagtgcccagaaaagaaagcaagttgtagataaatgtgtacaggtggacaccatttatataaaaatatttaaaacatgaaaaataggactaattacagtttacagataaatgcatatttagttttgaaagattatgaaaaaatgcatgggaatttgcatgggaatccagatccagagtagtggtgacctctgagaagggagaggggaacgggtgccagttctgtcagtcatgttccatttcatggtgatgcacatacaggcatattcttctccctccctttccttaaatacaagaaatatcttaatttaaaaaatttaaaggaagagtaggaatttgccaggtgacaaaaagcaggagagaatgccaggcagagactcagagaaggttctgaagggcagggggtgagtaggagagagaggcgtgaaatgagcctgcaaatgtgggaccccatcgctaagtcccctgatttaatgccttgcatatacaagatccttgataaatatttaaatattgatagagaaaatgcagacttgagttaaatctcattcttttgtattcgatcgttaggaaatatttatcttcttggtccacacaccaggcctagtcagagaacttttgtcagtggtctattatatatagttataaagtttagagtaaatgtttggaagctttgaacaatttgaattgcctcaacatgcaagcatgtgatcggtgggcttgtattttgtctactttgttttttttatttttgtagtgatttaaatttgaatatgttttacaaaagtatttgtccctggcatattagaaggaaaaaatggtccttcaccacagagagctcaagaagcgctattttagagagccttgatgtactcacttatttttcaggactgaacacctataataaataaaactgtaacatgtaatatatccaacagaagcagttcctttaaaagtgcatttaaaatattttaatatataagtataaatttaatatatgcatatatatttaattatatattataatcatatattttatgcatatatagtgttatataattatatctgcttttatatattaaataaaattatatattacatacaatgtacatataattatatatgcattttaatataatatataaaattatatattatataacatataatttatgcatttattatatatttaatatattaaaatgtatatttatatataaatatatataatacataattatatataaattgtatattaatatatacttataaaaatatattttatatatttaatatataaatgcatatatttaaaaatatatatctatataaaaacatatagatatatatagttttttttttttgagacaaagtctcactttgctccctaggctggagtccagtggcatgatcatggcatgctgcagcctggaactcctgagctcaagtgatcctcccacctcagcctcccaaagtgctgagattacaggtgtgagctactgcacctggcttaaaatatagttttaatgtattacatgtctgattgtatgccaggcaccatgccaagtgcctccatagatgttagttcatctgcacaaaaaccttctagggttgtaattcatattattgtcattatcattattattattgctagcacagaggactaaatgcactgctcaaatatccctgactaataagaaacacaaatgccttatgacacagctccggaaacagcttcatgagtttataatctgggtcttggagattatgatccagggcttagagacattcacattcccttgctccttatcataacaactcaggaaaggctgatacatggctacgagtcacaaactagctctctgagcacacctactttcttcacaggacagtgtttgacaccatgtaacttactcctcacaggttgctgtccccatgaggttcaatggtaaatctggagtcgaagtccgactgccaaatgacctggaagatttgaaaggatatacatctctgtccttgtttctccaaaggcccaactcaagagaaaatgggggtactgagaatatgtttgtgatgtaccttggaaataaagatgtaagtattgcttggacatctctcttgtttttgaaacaatgtttttcgagaggtgtgcttttgagatgtgtggcacggctgcatcactgccattagcacagcaggcagaaatcctactgagacatcgacaaatccctccagcttcctccctgcccacctccccactgtggcagtgccctcgaggggcctcccatgcattgttggttgctagaggatcaagaggctttacccaatgggcccagcacgtgggcatgtgtgtgtacatgtaaaaaacatatgcacttggggaggatgattggcacccctccatactaccaagttgtatgattgacaccacaccaccagggatcaataccaaggaggagtagctcctcctcacagaattgtgaccttgtcctcttcctcagactgcccagcctcagatccttcctcaagcctgtgggatggagagattatgggtgaggactggagtggaatgaatcctccctctcctgcctaaatgataagaaaagcagttgccctgtctctttatcagtgtaaattcatcactactactactatcagtgtaaattcactacccatacaggcattttgaatggctggctttagcttttaatccctccttttaaaatacatttctttgacataagtgtcagaggaaaagctaatcactcactgggttaggattcagttgttggaagaaaaatgcttgaaatatggttctcaaaaattctgcccaattaggaaattgttagttgtcactagtggatcttgtatttaaagattcttaaaatcaacactattgctaattactcttccatgcttcaagaggttggcattttatttgtagcttgttatgtcatgattttttgctttgttttgtggtaaaatgcacattactttattccttcagcaaatttataccatatacctactatgtgtcacattctggctttgtgataaacaaaaatttattctcgaatgtacttaatgccaatgcacacttaaaatggttaaaatggtaagttttatggatattatgccgtgattttaaaacattttgtttctaccttaaggcgctcacattctagcagggaagaaagatgcatatataactaaccatgataacatagaggtgtgacaacagaggcatgcacaaagtgttaagaggatgttgtgtggtactgggagaagcaaaatggcttatctcccttaccagactaaaatctgttggacggctgagtctatacctgggccctctgtatggtaggtgcttggcacatatttgtagattgagtgaatggaggaatgaataaatgagtgccctataacatgagcagagacagctctcacattattaattctgcattctatattattctataaaatattgcaccttgtttattctgtctctccaaggcttattgcctaaaacccattagttatttgaaatgcatcctcatcctcttgggatgggaatttgagaaaccacaatgtgaagtgttctgaggtggccctttgtctccaggcctcccgggactacatcggcatggcagttgtggatggccagctcacctgtgtctacaacctgggggaccgtgaggctgaactccaagtggaccagatcttgaccaagagtgagactaaggaggcagttatggatcgggtgaaatttcagaggtacaagtctgattgactgtacctgtgctcaccaaacttccatgtatacatgttgctgaaccccatttttagtggcttggctttgaattcttcaaattttttgtttaactttattatctaaattcattttaaacagaatttatcagtttgcaaggcttaattacaccaaaggagccacatccagtaaaccagaaacacccggagtctatgacatggatggtagaaatagcaatacactccttaatttggatcctgaaaatgttgtattttatgttggaggttacccacctgattttaaagtaagtgtaaatgttatttcactgaattaaatattaaaattttaatttggtatggtgatgacctcatgtctctaattgttaattacatataaaatggatttaaccgcacattcttacagcacattctagagatactagctaacacttattgagtgcttcctctgtgcactgttctaagctttagtatgttaatttaaataagcatcatgatcattcccattttacagatgaggaaacagagacagcgaggtgtaataacttgcccacagtcatacagctagtaaatagcaaagccagggcatcttgttccagggttcacattcttaattaacccttatgccatagtgactgttaaaagtgattaattgatactattttgattattgtcctttgttcaattggtggaagatgttttatttcattttcagcttcccagtcgactaagtttccctccatacaaaggttgtattgaattagatgacctcaatgaaaatgttctgagcttgtacaacttcaaaaaaacattcaatctcaacacaactgaagtggagccttgtagaaggtaaataaaatgtagaaaccagaaactctgtaactggagttttggtaacttgcagtacttttacatatgataaaggatgggccagtgagatgctattgatgttgctagttgctttgggccagtagttcttcaagtatgtgtgcatgcaacactggcagtcctgccctaaaatctaattatggtagtctcttcttaatttgtatgaaatgctagatagttttctcacttgaaaaaagtctttatgaaaatttttgtgcctcctaccacaaaatatttaatattagatggtacctgatctagaggcctgatttagtggctcatgcctgtaatcccagcactttgggaggttgaggtgggcagatcacctggggccaggagtttgagaccagcctggccaacatggcgaaaccccatctctattaaaaatacaaaaatcagccgagtgtgatggtgtgtgcctgtagtcccagcctcttggaaggctgaggcacaggaatcgcttgaactcgggaggtcaaggttgcaatgagccaagatcatgccactgcactccagcctgggcgacagagtgagactccatctccaaaaaaaaaaaaaaaaaaaaaaaaagaaaagaaaagaaaaagaaaaagaaaagaaaagaaaagaaaaagtggttcataaaatgtgccatgacttttttggtactcttccacctcaatctttttgaaaattgctgccttgaactcctaaccttccctacaattacaaggacatggtatattctaatatgaggtggaccaaatatttattattcagaataaaattacattgcaagttaataatctcttacatttcaaaatcttcagctggcagaccacatcttcctaagcagacatttccaaaagggtatcttactcatctttgtcgagctagggtttgattgtcagagtatgagagcacatccaggagaaagagctggctgccttaacattttaaagatgtctcctctgctttaacaaaattatgacaactagattgcattttcttggctccatttttcagatagcaacatcttgtattaataagcacactggcatggtgatcatttgctgctgtgttctaatttatgatgattaatgttgacaggaggaaggaagagtcagacaaaaattattttgaaggtacgggctatgctcgagttccaactcaaccacatgctcccatcccaacctttggacagacaattcagaccaccgtggatagaggcttgctgttctttgcagaaaacggggtaatctataacaagcatccagatacaaccaaatatattcattctgtttagcaatttggagataactgggttgttataaatgacccactagatctggaaaacaatgtgtaaatgttacctgcatccttttcctccacccagttgtactttctgttggctgggaaatgtactttttttttttttttaacatttttagtttcaggggtgcaggtgcaggtttgttatataggtaaatcgcatgtcacaggggtttggtgcacagattattttatcacccaggtaataaatgtagtactcaataggtaattttttctgtccttaaaaatacttccaccctcaagtaggccccagggtctgttgttcccttctttgcgtccatgtgtactcaatgtttaactctcacttataagtgagaacgtgtggtatttggttttctgttcctacgttcgtttgtttaggattatggcctccagcttcatccatgttgctgcaaaggacatgatctcgttcttttttatggctgtgtagtattccatggtgtatatgtacctcattttctttatccagtttaccatttatgggcatttaggttgactccatgtctttgccgttgtgaatagtgatgcaaggaacattggcgtgcatttgtctttatggtagaacgatttatattcctttgggtgtatacccaataatgggattgctggatcaaatggtagttttaagttatttgagaaatagacaaactgctttccacagtgattgaactaatttacattcccgccagcagtgtacaatcattcccttttttccactttcaacctcaccagcatctattattttttgactttttcataattccctttttgaccagtatgagatggtatctcattgttttgatttgcatttctctaatcattagtgatattgagcattttttcatatgcttgctggcagcatatatgtcttctgaaaagtctgtgtcctttgtccatttttaatggggttgtttggtttttgcttgttaattatttaagttctgatagattctggatattagacctttttcacatgcatagtttgtaaatattttcttccattctgtgggttgtctgtttactctgttgatagtttactctgttgatagtttctttcattgtgcagaagctctttaattaggttctatttgtcaatttttgtttttgttgcaattgcttttggggtctttatcatgaaatctttgcaaaggcctatttctataatggtatttctaggcatttctatgtctagaataggttttcttcaagggtttttttttatagttttaggttttacatttaagtttttaattagtcttgagttgatttttgcatatggtgaaaggaaggggtccagtttcagtcttgtgcatatgactagccagttatcccagcatcacttattgaatagggagtcctttccccattgcttgtttttgttgactttgtcgaagatcagatggttgtaggcgtgtggctttatctctgggctctctattctgttccattgatgtctattttaatgagggcaaataatcaggaatttgagaacatgccccccaaaatgtgggagaaatctccccttttcctgttctattctcattatcagttttgttatttgagaaccactgcttgcctaagaatctacttattctgacccaaaacatgtgaaaacttcctgggatctctaagatctagactgacttcctgctgtttctgtcttgatctgattcttaccaggctgtgtgggattgtgtctttatcagcatgtttgccttctcaagacactgaagcttctctgttttcaagtagctgagattcctagggaccctctaaaatctattaggttagaaaagtccaaagtgacactctacaagtgatcgtcagcgccatctgctggttgatggagagttggcgtgatgtttgctgctttatacctatagccggcctggagttgaaccctccggtgaataggagcttctgtagttgctctcacggagtatttctgaagaaatgtggatgagcccaaaggctttctggtggtccgagaacatgggattgataaggagcttgggattttaccagagtcttctaccgcagggtggtgacactgacccggtccaactctcctctctggggttggtctggacccttcaggagattccaaggctggaccagttctgatggtttgggaaggtcccagccagcctgaaggatacatagagcagagaagtcatccagcatcttcaggacacggcagttgttttacaaaacaaggtcttctttgtatataatttgaagttcttggagactaagaaccagaaatactactcatataataagaaaacttaacataataccattacataagaaatgacctagagatctgctttaagtaggatggctcatgactctcagtaaattggtgtaactctgttgtttatggtttgatcaacctaagctgactcccaaaggcaaggtttaggatccagataaggactgattttcctcttagaaaagaactcggtccctggacctcaaagagaggcattcttatcattaaggaactgtgtaaaagcaaagccttcaagccctaagtcagaaattgctcagcttatcttagggaagtagctgattcaagtatatgtttcacaccgtaatggagatgcaataatgacaaagacagatatggctcccgccctccgggattttataatctagaggggaagaatatgcaaaggaatgctgttaataggttgtttatttcatcacaactgtgaagagctgtatcaaggaaaagtttgggggtgaaatgaggatgtacaacataaaagacacttgagcaaaggaaatgcttcctctgagatcaggaggacagcatttgaacaggacatggggacaggcaagacgggggatccaggcagagggagaggcatgaagaaggcctggaggtgggaagggcagggagcactcagtggaacagtggctgcggggctggagagccagaggcagtgctgagagagaggcagatgccacgcagcatctggtaggggtcagggcttcatcctgacagccgaggagagtcacaggctcccactggcattttcaaagactgctctggctgtaggggggaatggactttcgggggtacatggggagaccggcgggttgttgctgcagggactggctaaaaatgttgtggctgagactaggtgggatgacataaagagagagctaagaatggcagaatttacaagattatgttggatgggagagaaggaaggatcaagaatgattcctaggttatgataaagggatgagaaagaaaaaaaatgactcctaggtttgtggcttgctcagcaataagggaaaggtaagcatggtgatgtatgtgtgtgccctgcacacgtgcatgcagggggcaggctgggagtcagggagcgcatgcacctggtataatggaagaagaggcaggcttggcagcctgtaggaggcatgtaggtcatacgttctgtgtgagatattctgaatttgaggtctctgtgagtcatgcaagcaaagcaataacaacaagggaatcacgtgtgcagacttggccctgaagacaggtctaggctggggagaacaatttggggcccatcagtacacctggattggagctacaggagagcctgtgattgtcaaggcaaagggagtggtgtggggaggaaggagtcctgtgtaggatccccgaggaacccccaacactgacatggaaggtagaaggggataaaccaacaaatgagacagagacataagaatcagtcagaaaacagatggtggaaggtatctgaggtctgcataagacctcgcctctctctaaaaggcactcatattttcaaataatattaatgatctgtatcttttcggtctccatctttatacaccagttatggatcgcatgaaacaaaatcatgatcatagctagcatttattgtgtctgtcctgtgggccaaccactgtgcgtgacatttaacgtgacttacagtattgaaccatcatcccatcccgtgaggttgctgttgcagcaccattatcccttttcactgaggcagcagctgaagctgagagcaggggggtctgtgagagtaacgggagttccagtgctctgcctcttcttcagccaagccttctggtcatctgcattgttcctctgtcctaggatcgcttcatatctctaaatatagaagatggcaagctcatggtgagatacaaactgaattcagagctaccaaaagagagaggagttggagacgccataaacaacggcagagaccattcggtacaccttttgagtctgtttacttgaatcgttaaatgtccttagtcctttaaaattaagtcagtgcccccaaataaataaataaaacttcctattaccagataaacttatggatgttaactgagggatatatccttttaaaatttgcacatttcggcatgaaatgtataacatatacatgatatctataaaacacggttaacttcaaatacaaacatttctatcaaaatgttttagtatcatatttttatccaaaaatgctactgctcagagccttcctactatgtatataaatgaatctgggggaagataaataaaaacatgatagttctgaacccctgtgaataggattctcttattttcgctggcttgctgattcatctctcatttatttcagattcagatcaaaattggaaaactccaaaagcgtatgtggataaatgtggacgttcaaaacactataattgatggtgaagtatttgatttcagcacatattatctgggaggaattccaattgcaatcagggaaaggtaagatgatttttttaaaacgagatttaaagcctttgttagtggttatgattgtgaccaaaaaaaatctggtctgccatttttaattccaccaacaaacaaacacaaaaagttaacttttccatattaacagtatagtcaacagaataaaacagatttaaatcccgaataatgagactgggcagtggaaagaaggagggtgggggaatgtgtgtcaccgccattgtcattctcgggaggggagggaccacgaagggtatagttgggttaacaatgctggcagcaagtagaacagaggctgtggccctgggcccttgaaggctgcataggagagcgtgggcctcccaaggcctgacagacatccctggggaactgaaagctgaggttgccaccttcagggagcctctggaagaatgtgaaacagtatgtctccttcacttcggcatcagctgctccttacatgctatcgagcgtggaattgttacgtaactgtttcttggatgagtgaacacatgaattaattaatgtgaaaggcagtaaagctttatctgaatgggaaaaatcccaccattttggaatgcacgtaaaaataacttttacattttgatcatttgtatcctcccggaaggcttttagatagctgacgatagtgtgtggacagaacatatcctggaaggattagtgcagcctcatgactaagtaagagtgctcccagaaggttaggttatgatgacttttatatgagatctgaagctagttaactcttttgctaacttatacatcagttggaaggaactagaatatgatttataaggtgtcatgccaaggtattctttcttctagagtccttatacatgtgggcgtctgtccattctacgtagtcaggtactaatctttgttttaaagttgtcagggttgcctccaaaggcaaaaatgcaaatgggaaagctgggcacttcaacagaacctgggggtgacatctttactccctgggctctggaaggagccttgcagatcatggtatgtagcccctgagttttacaaatgaagaaattcagagccagtgagattatattaatatttaatattatcaatatcaaatagcaattcagccatgaatagccagttatgaattgtcagtaagattgattttatttccatgaaatggaataaaataaaatcgtttaaggtagttttttcgagtacttttgagtatgtttgagagttgccacttattcattcattacacaggatttattgagtgcctaatgggcatcaggcagagtgacaggtgccaagaaggcaacaatgagcagggtggagcctggagaagaacagaagagagacagtcactacaggagaacatgacgtgtgccataggaggaagctcagggtgctgacagagcccaggagggaacctaatccaactggggccatcaggaaagtgacctccagctgggacctgagagatgctagcagtcagtgtatgtgaagcaccaaagctggatagagaaagcatgaacttgcaaagagctagagtacagcaggaagtgggatagggatgccccatggggctgatgtgggcagcaggggcctgaccacagagtaccttgaaagtcacagtaaggagccattggagggacttcagcagagaaaggccatgaccaaatttgggttttcagtagctcactctagtgcagggcagagactggattagagaagaaaagggcagaggcaggtagagtggctggaggccgagtatattaacagaggtgagtgatgagggtgacctggcccaaggagtggttatgcaggtgagcaacagggatcagattccaaatatatttaggatggtgaatgggcagcactgcacaatggcttgggttggggaataaaggggaaaagcagtcaagaatgatgcctggtttttggctaagcccttggcagatggaacacaccaacggaggagtggggtgagaagttaagtctgagacaggcttagtccaggagcctgagacacagccaggtggagaggcccacaagcaggcgcacaaaatggcctgggcctccagaaaggaggccagtctggagaagggtaaatgaagctcagggccaggtagtcattgaggtggtagaggccagtgggcttacccagagccaggaggaattctcaagttgaggcaataaggaacccattggtggtggtttgtgtttgcatgatattaacacaaggcccctagacagtgatgtggatgccagtcagtccaggttttctagaaaagagcagtaggtagaaccacaaaagaggtggctttagttttggctcagcaaaactttaggttaattcagcactcaacctttatttgccttttcatctccatccattaaagaaatatatagatatagagatgcatatacatagagaatttgcttttttaaaacaattttttgtagagatggggtcttgctgtgttgcccaggctggtctcgaacttctagcctcaagtgatcctcccacccccagaattctggggttacaggcgtgagccactgtgcccagtccagaattttctttctttttttgagacaagagtcttgctctgtcacccaggctggagttcagtggcgccatcttggctcattgcaacctctgcctcctgggctcaagtgattctcctaccttggcctcctgagtagctgggattacaggcatgtgtcaccatgcctggctaattttttgtatttttagcagagacggggttccccatgttgtccaggctggtcttgaactcctgagctcaggtagtccacccaccttggcctcccaaaatgctgtgattacaggcatgagccaccatgcctggcctagaattttcttagtaacttattttgggatcctccaaacaagggactgcttcctttttctgggcaagttttatactttgacctttttttttcttttttttttttttttttgagacgaggtgttgctcttgttgcccaggctggaatgcaatggcataatctcggcttactgcaacctccacctcccgggttcaagcaattctcctgcctcagcctcccgagtagctgggattacagtgcctgccaccatgcccggctaattttgtgtttttagtagagacggggttttgccatgttggtctggctggtctcgaactcctgacctcaggtgatccacctgcctctgcctcccaaagtgttaggattacaggcataagccaccatgcacagcctatattttgactttttattaaaatcactggaacatggaaaatgcaggagatagaggccagtcaaaagatttcactggcccttcactccctctaaagcaaaattctaaggaatagtcagctgttctgggtgttgcctcatccctgtggtgaagtctttggtggcccagagattcctgaaactgccattgggcatgagtcactgggaggtggggtgggcacagaggagttccatggataatccacagccaagctctgtaggggcaaccagccaacgcttccagagcagggaggtgttctggtccctggcataaatggagggaccttttagacaaagttctcaaacctaacctggagcaaggcaagcaagtgtaatcactaaatcagctttgctcaagggattttgtgcacgttttgtttcttccccctctcactgtagtgtttcttctgggaatggggacccagatcttggaatggcttgtttccgattataatcagaaatcattctgttaatcccatctcctacccaggagaagagcaaatcatccctggtaatgccagagggtgtgacaccaacaagggcatttttcttgaggacctacaccattgtttacagagtgtgattatacacactaaaatgaaaatgatccaaaaagtagatctattgaacatcgactaagtacccaacaccaagattagggctgccttttgttctttttgctctctgaagtcggcctgcaacagccatggagctggctaagcttttgtggacagattggcccaaagtatacataaataccccaacgcaggaacccaccaacacaacaactcatgccccagtgcaatcacattcctctagcaagtatgttcagaccctgtatcctggagtaaatgtagaactgtaggtcctcaggtaagccaaggtaacaagaatccccccaggaatagtggaagtaaatctcttccattttaacacttctgctgtaggtaactcttctagaaaaaggcatgatcacttccaagtgctgcaggaataccaactgtaagtgtaaaaagcaagggcttcaagcctcactaacctgtgtgacacactgacagtacagaccccagctctaccacttaccagctgtgtgaccttaggcaaggccttaacctcttaatgcctcattgctacatctatagtatgggcatagtagctgcctatctcttagggtggttggaagattcagagtgtgtaaaggaattagcagaggtcagcacatggtcagtgctcaataaatgttagataagaaaacctgcccttcctgcacatgtatcctagaacttaaaataaaataaaataatataaaagagaaaatacctccctcaaaagcttattgtaagttggattcatagagcttcgtgcaaaataggtggtctgtatctgttaactgcctttctctcctactattttccttttctgcaaccttctttctttgaccaataatctatggagagagggacatctggaatgtcgttgtccaagagatatgttgaaacccaaagaagaattgacctaaaaccatgtataaataggcaagctccaggaatggaaatgaaccctcctcctcttctgaggcaaaaggccatctttataaaataattaggcttatactgtaatgccagtgaggatttgtttctttcttttccttttaatgaaatttaattttaggtctattacaggtagctcaactgtttctaatgaattggattaaaatgaatgcagacacctttccatttagaaaagtaagctgcattagggatttagaatgaaatcagctttgggttttcttagtacatcatttgtttaagaaacacaaatatttgcctggacttcagttagttcatgtgtgtgaatgctttatgtgcattcagctccagacagatccagaagtcaaatcgaaggggaaatgccctggggccatgtagaaagagctgctttagaaattgctctcattatataagagcagtaatatgggagtagttactaacttgacgatctcacattgagtccttactctgtacaaaacactgtttgagtgtgttacacatattaactttcttagactatgacagccctatgaaacagattcacatattcccattgtctaaatgaggaaacaggcacggagaaaagttgcctgttcaatcagaagggacagaacttgaacccaggcaatttggctggtccagagcagcacaattttgcctctcagaaacacctgctgagcattcacgtccaggtgccatgcactgctgcaagctcttgctgtacgttaacttgtttttttggttttgtttttgttttttgaggcagagtctcgctttgttgccaggctggagtacagtggcacgatctcagctcactgcaacctccgcctcccgggttcagatgattctccaacctcagctcccgggtagctgggactacaggtgcctgccaccacgtccagctaatttttgtatttttagtagagttaagttttcacaatgttgaccagcctgatctcgaacacctgacctcaagtgatccacctgacttggcctcccaaagtgctgggattacaggcatgagccaccccacccggcccgttaattttttaaatcctggcaataaccctttgcccacaggtaggaggtggtagatacagcagcatatgaacccagacaatgtgttccattgtttcagcttggcattggttaaatcaagctacgtttttcataattgaatagaaccaaaaagtaacactttgtttcttctgactttacagtggctaacttaacagtgaacagaaaaaaaagagcaaaaggttttctagagcactcctggttcctacaaatgatttattactttattaatatatatgtatatcatatatcatctattaacttattaatacatgtcctatccacctgcaatgccgtgactccagcggggagggacgggcagttctagatattgtgcatgttctctgtctctttaccttttgcggccactggccattcttctgttaacattgttgtctgcatttttaaagctgggaatgtaaacttacacagaaaggaagtcagttctcccagcatcataaaataagtagcattatgggaatcccatgggaaaggataaacataaaacacctactcatttatgggtgaaaagtactaaagagcacagcgtttcagctctgatttcacgtgagcctgacatgatccatctcttccttttatctgtgttcgtaatcagatttaacatttctacgcctgctttccgaggctgcatgaaaaatttgaagaaaaccagtggtgtcgttagattgaatgatactgtgggagtaaccaaaaagtgctcggaagactggaaggtaagtgaaagttcagaacctcgtgaaggagtgcttcccagccaacccaccttccgtatccattaacgcagcaacttttgacttctttctgatagcacacagtgttacagtgaactggctcatatacactccccatgtgcttgcaagatgctgaaccttttcaggtttgcacattaactttgtaggaaagtaggaagaccaactatatacacaaaaacttacagatgattgctgacttattatgcagaaaagtaagctctctttctttctgaggttacataaatcacattaatcagtttgagtaaagtgagatagggtaaggtactgtatttcagccaagaaatgattacaatgccagtaatttattccatgtttgcatttcagcttgtgcgatctgcctcattctccagaggaggacaattgagtttcactgatttgggcttaccacctactgaccacctccaggcctcatttggatttcagacctttcaacccagtggcatattattagatcatcagacatgggtatgcagtagtgcattaatatcaaacaagatttaaacctgactcaaagtttgatgttaaaaacaacagagagatttagaaagtggtggagttgtacattttttctatcatcacacagtaaatgctattgtatagttcaaccataaacgttattccccactctggggtaggtcctcaaagaaatcaagtttagaaagtaacattataatttacagagttgcatttgtgtgtactcgcggactcatttttattcttttcaggtatattttataataagagttaaggtggattataactactgtagttaataatgtagcttaaagtttcagagctcagaaagaaaatcagagtgtgtccctatgatttctttttgattgcattaaaggtagctctctccagattgcctttttgcagcagcagcagcagcagctagttggacaatatttatacctggggaattggagaaaataagatccttttctctttcctcatgtacaacagagccacataaattctcttccacaaggagataccatctgtaacttaagcagatttagctagtgtggttatgtagatacagaagtcacctaatatttagaaatgaatatttgtggaatgagtggaatttttaaatagaagtagagtatgattatttctgaatttgtttctttaggattgcagagcacagcagacttctagtatctgtcaagaaaatggctggtggctgactctgtggctctgtaatatcaggaaggccgcccctctcttggtggctgactctgtggctctgtaatactaggaaggccgcccctctcttggtggctgactctgtggctctgtaatattaggaaggctgcccctctcttggtggctgactctgtagctctgtaatatcaggaaggccacccctctcttggtggcttgctcaccagtccttgaggttttatttttaaaatgagccctaaagaagcacatgctaacacttagactataggggtggcttttccatgaaagcaggatgttttgatctagctcttatgatacctaacacttgtttcctctgccacgtgtaggaacacttagtacacaattcacaaaatgatcgagagcagatggaagaattaggttagcaaaagattagatccgccctggacaatgggggaatcctggatatagcatagggacattgccctcaatttcataatgggttagctaaagatacatataagttagcattagtttatgcaattcataatgaatattgccaattgaaaaaaagtcaacacaaagtaaaatcaacaatggctataaccacacactgtaaaacttgttttagactgaaatcttaccaaagaatcacatcttgttgaaaactgcagaaattatacttggtagaaaaaacacaaacaaaattgaaatgacaagtgctgagattgcacattttttaaattaatgattgacaggaagagtcaaattatcttgcccaaatttacatcttcagagttcaacatggagaattggacttcccaaaaataatgactaggaaataaaaaatttataatgactgaagagaagaaatcattgtaatattcttatattaaaaattgaggaatcgagtctttgctgtaaaatttatttagcaatgaattgatccgatagaaataacttcagccaaagaaaaataaaaatagaaaaatttagactgggcatgacggctcacacctgtaatcccagcaccttgggaggccaagccaggagtatctcttgagcccaggggtctgagaccagcctagggaacatagtgagatcctgtctctacaaaaaattacaaacttagccggctgtggtggtgtgcgcctgtggtcccagcttctcaggaggctgaggtgggaggatcgcttgagcctggaacagtgccactgtactctagcctatgcaagacagcaagactctgtctcaaataataataataataagataaaatataaaaatttagaaatgatttaactgttttgtatagtcgattgagaaattaaattggcttaatgaatgtaggtccaaaaaatgattttgacaaattcattggtgttgacataatttgcataagatttttatatttataaacatggagtcaaatatgcaaaaaataatctttagagcaaaaagcaaactcaaagcatttgggtcaaaacatcctgattgttttatacatggtttggatgataaattcagtaaagatacaggcataatccttatatgcaaattagttgatgggtattttctatggtgatttcagacaaggaacctgcaggtcactctggaagatggttacattgaattgagcaccagcgatagcggcggcccaatttttaaatctccacagacgtatatggatggtttactgcattatgtatctgtaataagcgacaactctgggtgagtggaataatacttctgtcagagctgtgagtgagttttactctctttcgtttaatggaattttctggtgtctttttgcaaaatatttgtccttgataccaaaaatacttcactaataagtcttgtccttcttcctttttccatatcaatttcttcataaaaaaataaactgccacacatggtggctcatgtctgtaatcccaacaactaagaaggctgaggcaagagggttgcttgaggccaagagttcgagaccagtcttggaaacacagtgaaaccatgtctctacgaaaactaaaataaaataaaatgtaaataaataaaattttaaaaataaatcagttggatggataaattgtggtgtattcaaatggaatgctatatagcaatgagaaagaaggatctagaactatatgtaatgacatgaatgaccctcacaaacataatgtggaaaacattgagtcacacataaaagttcatctcatatgatttcctttatacaaagttcaaaaacaggcaagaactaatccattccatcagaattcaggatagagggagggaggctatagggttaaagggaatgcacaacagggtacctggggtgctactctgttccgtttctttttctgggtgctggtaatgttggtgtatttctgttgcaaaaattcgttgagctgaacacttatagcctgtgcactttctgtacatgaggctctcataacacagtctttcaaaacgccatctttggcaagatacacccattttaataaaaatgtgatgtgcaaaagaaaatacatgaaaaaagttgtaatgctctttaaaaataaagtctagtttcactagttattttagataacaaatattgaatctgagtcttagacagtgagttggccacatggcaagggcccttttttccagcagttctcacccatgatttgcttttcttccctttcagactacggcttctcatcgatgaccagcttctgagaaatagcaaaaggctaaaacacatttcaagttcccggcagtctctgcgtctgggcgggagcaattttgagggttgtattagcaatgtttttgtccagaggtaggtgatcctctctttgtgggtaactgatgagaacggcctgcccatgggaagggtatctctttggtccagttaacaaagtcagctttgtcaacatgtgctgcacgagacccgcataccacagtctttcaaaatgccatctttggcaagatacacccattaaaaaacccataaaaaactcctgggcccggcctccttttggaggagcagcgttagcatgtaaccttggaaaagacctaattaaaattaacttcagattatggcccggaaaagtattcactggaattttattgcattataatcaagattgtgcaattagatttaatcagctctccacggttttcaaggccaaggaactgcatggaccagtgctgtgctaggaaaccaaatcaccacaatgttgaacgtgatatttaatagagagagagtagctcttggggcttccatgcaagtgtttacatattttttttgatacaaaattattgtttttagataagaggcaaaatcttctccagggtaaggagagggcctggttctggctatgaatctcaggctggaattctcaggctaccatgacagggagcctcccacccatcagggctccatcctccttggccaggatgaggcttagagttctcatttccctcctggttgatgaaacatcttccttgaacatctaattcagggattggagcaggaggtgggagggatggggaaggcccaggggttgttagcaacagcttactgccatgataaggcttggacaagaatcgtgagataaagcaaatttgtccaagactttcctcctcatagtcagataaatccttccataaactcacctctgaagtttccttatatttaccatcattcagtatcatccagtgcccatcttctccctctgtgcatattttacgttcgtatttccacatgacacccatttcaaagaaagaactatagtatcccggccctcccacaattctgccacaatcccaagtcaataaaggtttcttgggctcctcgccggcttctagaggtgatattaaagtaggagatgaaagtttccctaggaaccatgaccataagaatgtgtaatttttaaaaaaatcatggatacataacagttgtattaatacacatttatgggttacatgtgatattttgatacagttctacaatgtgtaatgatcaaatctgggtaactggaatgtgcttcatttcaagcattcatcatttctttgtgttgggaacattccaaatcttctcctctagctattttaaattatacaataaatcatcattaacttgagtcaccctattgtgctgccaaacactagatcatattccttctatctaactgcatttttgtacccattaaccaacccctcttcatccccaaaacatgtactttttgaaatgagctctctctaccagagggtcttcctcgacatgtccaagtttggcagcatctttcatttctgctctttttccaggttatcactgagtcctgaagtcctagatttgaccagtaactctctcaagagagatgtgtccctgggaggctgcagtttaaacaaaccaccttttctaatgttgcttaaaggttctaccaggtttaacaagaccaagacttttcgtatcaaccaggtaagtgtccaaacctaaccctgggtttccctcttccctggaggattcccctgagcctgccttgtgggagatattggggaagggggtgagagctcaccagtccataaagtgggattgatgcattatcaacagttgaatcacaccaaaatgtcaaaatggttttctttttagcttgtatttcgcatcttgatgaaaagttggcaagttttgcactcacagaacagaaccatgacttaggtttcttaatttctgtagctgatgtcttgctgttttaacatttctgctgtgtccccagcaggtcctatgtttttctatagaatataagggccatgctcctcttcctgcccatagacctcccctctgttctgatgcaactcctatgacaagatacgtggtgtacccttgactacagactagaaacacctggggagctttaacaccccaatgcttaggctgcatctgacccaattaagttagatgctcgtggagtgggtgtctcagtagtttgtgaagctccccaggtgattctgaagtacagcactcagagggactgagaggaaatgaaactccttatttggaggagcagaacattgtgatgagttgaacacaggatcagggtttaaggagctccttgctctgctcaaggtcaacaatgtaactttcccaggtctgaggttacaattaatatggttaatggataacagtgggcacctcggatctgccaggcactgcactatgcactccagatggattttcttaccaaatccttcaataaccttatgctgcagtgcagaaaggtaagcagttctgcccaagctcccacaggtggaaggtgagttggagttccaacctaggagcccgtggcctcttgagagctatgtgctcctgttcaacacactttccacttaatgtcaaccacgtgctgcttctctaccaatatttccccactgcacaatgatttgggagagcatgaacagataatacctaataaaatacatgttttatgctattaagaagaaatatacttcataaatccagaagggctgtcattttcccattatgggaacatctttagaattgccccatcaaaattgaagtcatatattcactttttcattgtaaggctgaaagttattgagagactaaattagcccagtgatggtgaactggagagagcaaatggattcaaatctatttacaggatagaatacacatgactcagacaataattgaattgggaagacaagggagaggcaggagttaaaataattctgaggcacccagtctgggttattggatgaatggggatgtcccctccatggagataggagaaggacacgtatttggaggaaaagagaatggagtttgtggtgtattgagtgacaggagtctgcaggacacccaggtgcagaaatttggtgggagactgtcaggagtctctgcgtgggcttcagcagatagggtgggactggggctattaatgtggaaaacgtcagcgaatacactttcatttccccctgttttgcgtaagcccccagtttggatggaataggacattagtctctgcccagtagcagagagaatacagcacagcttagtggttaagtactggactctggagtcagacttcctgggtttgcatccggctttaccatttattaggtatgtgatcttgggcaattattaaacctctctctgggtctatttgctccaatgtaaatgaagataaataatggtaatacctcatgatgttgatgtgaggattaaatgaagtaataaacacaaaatacttagaaaagtgcctggcacatagtaagtatgcattaaatgctagttattattactatgcatgctaatgaaaacctaaatgaaagggcataagatgctacaggagtggtgtggcaggaattttcctaccatgggaatcaggagggttcttctggaggaggtaccccaggaactgggtctggagtgtgggtcgaatttagctgagtgaatattgttgctgcccaagcagaagcccaaagctggaggcaggatgtggctgggactcacgggtgcaagacatgctgcatgcatcctcaccagactgacttcatgctctctctctcccttctcaacacacccctctgagagcagaatcaaatgccaaccttacaggtcaggaaattgagtgtctaagaggttaaaaaaaaagttgccaaagagcatcctgtcagtaaatggtagagtcaggattcaaacttaagactcttttttttccatattaactaaatttttatttttattttttctttttatatatatatattttttattatactttaagttctagggtacatgtgcacaacgtgcaggtttgttacatatgtatacatgtgtcatgttggtgtgctgcacccattaactcgtcatttacattaggtatatctcctaatgctatccctcccccctcccccaccccactacaggccctggtgtgtgacgttccccttcctgtgtccaagtgttcaaacttaagactcttaagcacaaagaacgtgctcttctcccaggcactcagagctcagtggggatctccatcagttaaagcgaagggtggggattcaccttactaggggttggttcagaaatggacatgtgacccctccctcctggacaatgagccctgagaggaagttgagggcgtggcttctgataaagaattccatgttagcacaaagagaaacccaggcagaatccatgcttcttgtgttggacagtgtagtgaggatgtgattcccagaagcacaagaagaacacaagattcaaacttaagcacaaagaatgtgctcttcaagccacatcatgtggcctctacaggcccgagagcctggtgaacagtgggaatggagaaaggagactagagagaggtaaactggaatcacaccctggggccagatcaggcaagcctcatatgacctacatcaattggacatttttctatagtcagtgtaacgtcattgaaaggagtcctgtaaacagctgaaaagattaaagattactaagctggtagcagcctgtgggatggtttggtgtaggaaagttctagagccaaggagtcagattggcaagctaccgtaatcatctaggcaaaagagtcggggctggctgggcaaggtgggtcacacctgtaatcccagcactttgggaggccaaggcaggcaaatcacctgaggtcaggagttcaagaccagcctggccaacatggtgaaaccccgtctctacttaaaatacaaaaattagcccggcttggtggtaggcacctgtaatcccagccactggggaggctgaggcaggagaatcacttgaacccgggaggtggaggttgcagtgagctgagatcgcgccactgcactgcagcccgggcaacagagtgagactccttctcaaaagcaaaaaaaaaaaaaaaaaaaaaaaaaaagagggctgactttcagggcataggcactagaaatgaaaaggaaggagtggaaacaaaatatgtcacacagaagaagagtaggacatgagaactgaatgcctgaatgcatgatagaggccagggaggcgggtgtccatgaggaccaagattttgagcctggatgctttaaaggatgatgatgccattaagagaattaagggacatttggtggcaaaggctgtctttcaaaactgttcatcttgatgcttatgctgctgacacacggagaagactccagagagggagcaaggcccactggtatgagtcccaggcaggagcccaggctgggttttaatctcagtaggatcaaggtttggctgatataagtaactcacttaagtttctgttgggtacagtagaacgtctccattcagcaacgtgcaagcatcattttaaataactgatttcaagtttgcgttctgagcactatatccaggaaatgggtcagggaagaaaacccactcctgaaggaatgtgaatcttttgggaagcctttagctgctgaatcagaaaacccactgcaaaattaatgacttaaacaataataataatctcacacagtgagccatgcaggggtaggtgaggcttgaggcctggcccatcaggagttggctctgcttcctcttggtcctcttggctccatcctgggtgcttctgggaatcacatccgcaccacaccatccagcacaagaagcaccagttctgcctgggtttctcttcgtgctaatatggaattatttaccagaagccccgccttcagcttcctctcagggctcattggccagcagggaggggtcacgtgtttatttctgaaccaacccctagtacggtgaatccctaccctttgctttgactgatggagatccccactgagctctgagcgcctgggaaaagcgcatgggcatttcagaacttgagctctgcggtggagaaaagaggggcagggctggggaatctcagttacttccaacaattttcctagtcacatttaacatttattatggttgtttttctgcattaaaactcagtcccattcaaaagttcaaacttctctgcatgagtcaactctggtggaagtggggacaggatgtggtcccctcccttctctttctctcctgctatcttggtcctttcacctgccctgttgcccaagtgaatggttgttaggggaggtggccacaggtttgcagttccatgtttcactggcaggctgtgggtgtctcggtgccgctggccaaatgctggccccctcaagcgacactgcagttcttccaatgctcagtggtggaaaggggcaccaggcagccactggtcccaggtgcggcagctttcagagaagaacccagacttgtgtaagatgagaataacaggcatgctccccaaaggagggagagaaagggggggtatttagactctcctaaactttgttttccccaaaagaatgagcccctctgcctcctagccctgtcttacaccttcctggtggcaaaatgctcacaaatcaaagccacactagggcattgaaggggattacgaggatctggcttcgggaaaggttaaagagctaaataaagaatgagctctccattctgcccactccataccagtcagtgacccgcaggaagggctctcagcggaaacttcccatctccatggtaccaggccttctattgccctactgaattcctcacttaggatcaagggtgaaaattaagcaatgtacttagcaagataagcattcttcactctttcccctgataattgtgttgctcttttcccatgcagctgttgcaggacacaccagtggcctccccaaggagcgtgaaggtgtggcaagatgcttgctcaccacttcccaagacccaggccaatcatggagccctccagtttggggacattcccaccagccacttgctattcaagcttcctcaggagctgctgaaacccaggtattatttagctttcctgccccagcaccagctcagaacctgactctgcgattccacctcagggaagtctgactgccatgacaccatgcagctctctctaatgaaggtggcactaccatttttgtgcaaagaggtgctggcctgcacaggacagggagcgtgattgcctgccatgtgctttcccaacagctggaggcaaacgtgacgacagtgtacttctcagaggctgaaacaatcagctcaggtctggtttagaattgatggtgttctaaaaataaggatgacattttttttctaaagctgctgtttatttccatgataaatcacctttcttttcttgtattctgtagtgaaagtaaaatcattcttttttggtagacgcagtgccagatagatcatttttagagaatacatttggcctttttgcgctaacaagttgcacctcttttggggaggcgggaatgagcagaaatattaattatgtcagaaaaaaattagaaaaacaagatttgtcattttcaggtgatttgaaggagccatagataaaaaggtactgaccttttcttcacggctttcccacagaggcagaattgcccggggggctaaaaggagctggctctaacatctggctttcagtcctgcttcaccacttactggctgggtgactccagaccatgtgccagggcagcccctctgagacacagacactaagatgggattagatgggcaagaggttcattgtggggaagcctgtgagagatgaccagaaggggacagagatgggggcaggcagggagagcccgcagatggctgtgggcctgcagatactgtgaggggagggcgcagggaggacagagccgggtaggaagggcctcgggtcgcagtccacagactgtaacacagtctcagccaggtgcctgcagtgcccccaagcagagatcatctctgagaagagctcagtgttggctataaatggcccggctctaatacccccgagtgtcactgaagacctagggcatggcagccccactgtgctccctgcagcagcttctcttggagcacgacttcatggctgccacatgccgtttaacttctctaagcctaagctgtccctctatgcctgtcttgcgtgttagcagattgctacctctctctggacctcaattttcctgttagttaaatgggctcgatgatgcttttcttgcagggaggagaggtcatagcttataaggaggctggcccttgaagcccactcagcaagctgtgagcatgcatcacaggcagagagaggtaaaggtcagagagagattgactgccaagctctgaaggagaaagcctgtgtggacagctccacgtctccagctgccccatgcaaagtcttggggtccctcattttccaaaactgtgctagtagaagctaaggcagaaggagaggagattgtccctccagttgtcccctcccctggctactccttggtagggaggccccactccccacccctgctctcttggtcaagctgaccttaatgacaatgacctccctctttcttttctttttttttttttttgagacggaatatcactctgtcacccaggctggagtacagtggtgcgacttggctcactgcaacttccacctcctgggttcacactattctcctgcctcagcctcctgagtagctgggactataggcacccgccaccacgcccggctaatttttttgtatttttattagagatggggtttcactatgttggtcaggctggtctcgaactcctgacctcgtgatccgcccacctcggcctcccaaagtgctgggattacaggcgtgagccaccgcgcccggccaacctctctctttcaagaaactgcctggaggcccctttccccagcctcccgcctctggcctcccccttgtggcctctccatcagcttggcgccccccccccgcccggcagcttctctctcaacacattcagtgcagtgagttaccaacttctaacgattcaacccctgtgccttcccgtccaacattaaaccgtacatcattaatgaaaaagtaacattttaaaaggtaaaattttttaaaaagtcaaacagtaaatataattttcaacttatattttagccccaaatgttgtagcaatcagttattttcagaaagttgtaagagttggaggattctgttgttctcattctgatttacattctagcagtgttctgacactcctttaaactggtgccattgctttacccctttggtgaatgtataaaaatgctctttagctctctgccctaccctcccatcctccagcaatgaagagtcatagctacagtatcatgtactgggatctgaatccactgctgcctttttttgggtgttagtcagttagtcttttatgaaagaaagttgctttaggaaacagttctggaaagcaaatgtcaaatctgatcaccaggcccacatatggaaagtacattctattctgcagcacgttctaatatcctccttaacttggctacccctcattctccaaacctccgcactaacacacagacacaccaagagaaatattgagcagtgttaccatctggttggcttaatttaacaaatatagatttctctttcgttttgaagaacattgccctcaaggaaacttgctaatctgaagaataaatgtgcatcttagcctcacagaattaaaaagcaaagagaattaacagtataatttgtttcttccacttctggtttctgcctccaaatttcccatttaccatttaattcaattcagtaactatttatcgagtgcctactgcgtaataggcactggggatgccgctgtgagtgggatgaacccatgcctcctatctggtgtctgcttaagacgttagccacaggaatggctgaggacagcctgttgacatctgcatctcccacgaccctttcacgcacacctttatgcatccctctcagggcacccctgcaccataaaccactcaaggaaggaaacatccatcgttgcattcctactgtccagcactgcaccttatgcatcttccacactcattaaatacttgtttgatgggtggatggatggatgagtgtgagttttcataaaaagtaaagcttgcttagctggatgtgcatagaacatgtaaccatcatgcaaatgaatactaacttgcactctgcttttttttttttttttttagacagagccgctgtgtcacccaggctggagtgcagtggcacgatcttggctcactacaacctccacctcctgggttcaagcgattctcctgcctcagcctcccaagttagttgggattacaggcaccaccaccacgcccagctaatttttgtatttttagtagagacagggtttccccatgttggccaggctggtcttgaactcctgacctcaggtgatccacccacctcggcctcccaaagtgctaggattttcccatagtgctgagattacaggcgtgagccaccttgcttggcacactctgcttttactgtatgatatttgcctcattcttcttccttcacagggagggtattagggtctaagaaatgtagagatgggtgggagaaggtgggtctgtgcttccgtgtctttggttaaatctgtctaacagaaaggaaaggcttctttgatgcttaaatcacatccttgttattcaagttgtcccctacttctcctacgacttccctctccacgaatacatacaaaacagaatgcatattcattgagtttgaaaagtacaggcttctcagtgaaataagccagtcacaaaaggacaagtcccctacaattccacttacatgaggtatctcaagtagtcgtgttcatcgagagagaaagtagagtggtggtttgttgtcaggggctgtgggaagcgagactagggagctcttgtttcatgggtacaagtttcagttttgcaagatgaaaagagttctcgagattgattgtacaacaatctgaatgtacttaacagtactgaactatacacttaaaaaaggttaagatggcacattttaggttagcgtattttaccctaactttttaaaacatggactttttataaaagattcagacatgtttcttcttgccatgtgctgggacttacaccactagctaagtttgccacaaaagttccatgttattccccaatgtagtaaggaaattatacaacaaaaccattaacagctggaatagaatagctttttaaagtttccagagaaacgggtcatttaatcagtacctacgttagcttatccatttgaaaaatgggggttgggtgtttgctccccaccctctgtctcagtgctgagattcgaaggaacgctgaacacctctatttcccttcatcgccgatgttcccaacaggtcacagtttgctgtggacatgcagacaacatcctccagaggactggtgtttcacacgggcactaagaactcctttatggctctttatctttcaaaaggacgtctggtctttgcactggggacagatgggaaaaaattgaggatcaaaagcaaggagaaatgcaatgatgggaaatggcacacggtaagagctggggctgtgtcagtatctccagttggtgtggaattcactgttggagtcgctgaaaataggagtcccagcatccttcccagacatgagggcgtggagtgggagagcttgtgtgcttgcaggcgctgcgttcccagcatctcagtactggaggccgcggcacacacattgcatggctgtcatcctagacagtaaagtcaagatgggctttactgatgcttcttccatcccctccagccctcccccaggctgcctcatgccccttgcctactctaactccttcatcctggaccatttcttccccttatggccaatttccaggcctccaggcccctctctggacctggaatgaccctagcatcttggctcttgcttaaagccattccagatttcaagaaataccatttaaggcaataagggacctatttatttctctaatgaggcaactggacttcagaaaatgtaagtgacttgacaagttgcattcccttagtcattcagctgccttcctggaacacataagcaaacaatcctcaatgtaatgtcagagattggtaagtgctttgagaaaacactagagcaaggtaagaaaatgacagagcagggagactattttaaataaggcagtagagaaagccctggtacagcaggtggtagtcacatgaagttatggggagggggttccaggaagagggaagagcaaataacaaggacctggaggtgggaattagctgaatgaacaaaacacaaagcaataagaaatggaattagagaggaagacagagcccagatcatttaagctttgaaggccaagctccgactttggactttatttgaaagtgtctgtaaagcttttaaagagtcttaaaactcttggccaggcgcggtggctcatgcctgtaatcccagcactttgggaggccaaggcgggctgatcacaaggtcaggagttcgagaccagcccgaccaacatggtgaaaccccatctttactaaaaatacaaacattagctgggcatggtggcatgcacctgtaatcccagctactcaggaggctgaggcaggagaatcgcttgaactcaggaggtggaggttgcagtgagccgagatcacaccactgcactccagcctgggcgacagagcaagactctgtcaaaaaaataaaaataaaaaaaataaaactcttacatgtacagattcatatattatttaattctttagctgaagagactgccagggggcaagagtagcagcagggggcccacatggctgctattgcctttgcttgcggaggctgtggggaggtcgggagaagtgaccgccaggacgcatgctgaaggtagaaccacgcggccttgctgatggatcacatatagagggtgagaggaagagagggtccagatcacatcctgtgatttggggccagcaattgagtcattagtgggcatttactgagatgaagatggagaagaggcagatgtggccaggaggagagcagttcagagctgggggagaatgaggatttctgtcgtgaacatctcagggttgagtggcctgtcagaccttcaagcccaggtgtcagcaggcagtagaggccaaaggtcacagcttggcatataaatggaagtgtccgtagtgaatagtctcaccacacctatgagatggcagaatccacaccagaccccagggatcagaaattttagcaaagagtttaaacactcctcttgtttgaagagaagtgccctcgttctacctgctccaagaggccagcccagggtgccacgactccaacacacccccgtccccagcactgtataaactgtccctgcccctttgttacatggagggggttgcctgtggctgtgccttgaactgtttctcttttgtgtaagtttccagatgaattctataatctcttttgattagttcacttctaagcaacctttttttttcagttccccttttgagctcagtttgttcagtatttcacataatctcacaaaacgatggtgatagtgataaccggaggaaaaaatctctcatcttttgaagctatttgaaggagcatgaaaacatttttttttaatttggccactaatatttaataaaatacaacaccaattgtcaaaggtaaaaatacaactcacgtatctttcttactctgaaggtggtgtttggccatgatggggaaaaggggcgcttggttgtggatggactgagggcccgggagggaagtttgcctggaaactccaccatcagcatcagagcgccagtttacctgggatcacctccatcagggaaaccaaaggtaaatagttatgttcagagccatggacagaaacaattcaccttatattataggcataattgtatgagatattcaaaatactcaccatatgagaatctcaaaatactttaaatgatttttaaggatctaattaatgttcacaaccacatagagtaagtgcccatttcttaacccaaagccttcatttctaaggtgcaggttgagacgcaggccctgaaagggtgaagatagagcttctctgccacttcctaaacctgaatctattggcttctcctccagggaatgcaaaaacgtaggttttaggttatagacagagattttttggttaacataatgtgtttcaaattacagtaatttgtgccattttcaccatctttgccataaggtaaaacattggcttaactgttttctctccatcaaactatttattttaaatgtgcttctatgggatctttttatctctcccataaatggaaacccaatattctttaccataaataatagataaccctgagaaataaacatttgaaaaccaaacactgttaatatcaaactaagtagtgtgacctatgtgttctttgcttggagaaaaaggtgcttaacacgtaatcaagagggtgtttaagacatactagcacaaagccaaaagctgttccttgtcctcgtccaaacgctagaaagagaattgaaaaaggaataacttaataatggaatatgtgttttaatgttatttgatgtctgaaataacaaaattatctcaaaaacccatcttgggaatgccagacgaagggaaagttgggactccctctgtccccagagaggaggggtgcttttctaggtttgtcaagttcaaggctctgatggggcgctctgatggggccacagctccagggctgagctctgtgagtgccctctcccttcctctctcctaccccctgccacagcgttaattgcaccagggttacttgaggcagccttgggcacctgtctttcttgtctcagatttgcctttccccccaccccacaaagttaagtaagatgagcctatcaacagctcaggtctagggactgtcctccgccttaatgcaatttttgcccttttcctccagacccagtggcacattttggtgtgatgtttgcttgcagtgggaaaaaaagagccccgggctcaaatctgggcctagaaatgggcataatgaaagcaggtctctccaccagcttggatgctagctgcttaggctgccctagccttgaccagggctcagcctggccctcttgggttttgcactggggtttgggccagagctccagtgttatacaataaagtatatttattataccccagcaggcaacagagtattactttgctttgctatatgcagtaacttatatatatttcataaaaatacataccatattatccattatttataatacacattatatatataatatacaccacacattaattgctaaggaggattctcattgttaatgtttacttttctcaacctctgttcctattttctttttttttttttttttgagacggagtcttgctctgtcgcccaggctggagtgcagtggcaccatctcagctcactgcaagctccgcctcctgggttcacaccattctccttcctcagcctcctaagtagctgggactacaggcgcctgccaccatgcctggctaattttttgtattttttagtagagacggggtttcaccgtgttagccagaatggtctcgatctcctgacctcgtgatctgccctcctcggcctcccaaagtgctgggattacaggcgtgagccaccgtgcccggcccctattttcaactcagagaaatcacaggatggggcaggatttgggtattctttggctttggataaattctcttcaaaccaccttaatcacacccagcatctaacatctgggccaaatagtagcaccccatttacaatactctttacagaccaagtttctttttgcagccttctttcaacctgagggtataaaccatctcatgggccctcccacatatccttttcaggagcaggccacatccgatcagtgtctgcctctgaacaccggcactgcagtcagcccttagggatcaatgctgggttctggcccatcctggggagtcctagctttaggacacagctttttcattgtgtagcatgacaaatcttaagaaactaaaagtttcatagggaatccaatcagtagtttactgttgatgctggcaccatgtgcatttatcacatcaacattttctctttctttctttttttttttttgagttggagtcttgctctgtcacccaggctggagtgcagtagtacgatctcggctcactgcaacctccgcctcctgagttcaaacgattctcctgcctcagtctcctgcatagctgggactacaggcacctgccaccacacctggctaatttttgtatttttagtagagacggggtttcaccatgttggccaggctggcctcaaactcctgacctcaggtgatccagcagcctcagcctcccaaagtgctgggattacaggtgtgagccactgtgcctggccaccattttcttttaaagttaccatatctttattaccatgtctgacttgtaggattccagagtcctaaaggcattcattctagaagggagttcaagagttttattcggtgaatctcaaactttcttgagaattttatgaaatttacagtcctccccaggaaaatgcacacgcagaacacacctggtgtataatataggagagcacagaaccccacaagcctgttcctgggccccaggagaggagtcccctgttccagccggctctaggcaggcatggggctccacgcaagcccactgtcaatgcacactgtgtcttattttaactctgcagcattcgtgacttggtggtggtgcactgagcccaacaatgtaggcagatttttttgcattttattattttgggaacattttggcctctttatttttgtcagctgccctgcagtaagctaacacactgcctcgtggaactctaagaagtggtttgtatctgcaaagagacggtgaaatctgtgaactgtaaggtggaaatttcccttgttgctgctccatctgtgaggaccagggtcaggtcaaccttccctgttcttattctagcacaagctagcaacctgcactagcccgccctcctgcacacaccactttttttggtggcacctgcaatcttcgaccacccacccaacatctggtatacaggtttttcttggcactctgggcagagagccaaatagaacagctattagaacctgagtttgaagaacctgacttggaagcgggaagaatgaatccctacctaccttcccccttttgctgacaagctgcagtgcccttcgccttggctacccatgcctttcttggaggtgtaggtaatgagctttttcttttctgcttggttgcagagcctccccacaaacagctttgtgggatgcctgaagaactttcagctggattcaaaacccttgtataccccttcttcaagcttcggggtgtcttcctgcttgggtggtcctttggagaaaggcatttatttctctgaagaaggaggtcatgtcgtcttgggtaaggagcagttctatagaatttaagtctttgcatcttaagaactgtatcctgttttctttcatggtgatgctttaacttttgctttgtttctcttttgaaagctcactctgtattgttggggccagaatttaagcttgttttcagcatccgcccaagaagtctcactgggatcctaatacacatcggaagtcagcccgggaagcacttatgtgtttacctggaggcaggaaaggtgtgtagcagtctgatgccatggggagggtctgtagaaaccagcttcaatgtctggaggccacagcgggtcaggtttgtagtagagaatgggatccaatcttgtatttaagagccttgacttcagtgctaacttaccattttcctttagcaagtaattttatcatcatgttttctgttcttaatttttaaaactgggaaaactcaaacaagtcgggctgaattgcaggtccagcacttggttatatggtcctaaggatgttactcaagctctttcagacttatctgtaaaatgtagataataactcttataacttaaggcttttgtcaagattatagaaatcgccatatactcaattcttacagattctttcttcatctctgcagcctcatttttccatcactcacaggcctgagtcaacatcttattttccaccacccagttatatctctttccttctcaaagatgtctctttaaaaccagattcttctaggaagacccttagttgaggcctcgagtgaaagattgatataatatgccattttctttcatctccgtccttccacagtttactaaatgtgaggggaaaagaatcccagaagaaaataaaatgcccaaaattcctagaatactttctattgtagtctttaattaagtctgagtaggtctctggtagcccagaaaagcaagtaactatccacttgcaaggtggttgagacaattctggtttttcagaggaggagctggagagagtctctactgagagtctctgggagggaattattctcaggaaaacaaatcaagacccgatgaccttcataatagcagtgacattgtttagctcaaaaattgcctgtgaataggctgtcccatctagctacatgcaaattaaatgtaaattatttataaacacacttattttagtcctctcatttcattccccttgattcaactcttggaagatcctggaggagaccctgatttagaaagcaggaatgtgggattctgcacaaaacagactgcgtgcctggctcccgatgcgtgcccagagcaaactcaatcattttgcttgtttaaagtcttgccatgcatggaactattacagttggctggcccttgcagcaggctgtaggcctccaccagtagctttgccttccacatctcacatatccttccatacagagccactgtcacgcattaattgctaaggaggattccaatcagtaacctttgagttgagctgatgggggcggggtttggattagaagggaacaactcattgccattggcaacgacttcaggccagggtccaccctggtttatagttgcctggaagggatgcagcagagagatctctggaagcattggaccccatgtggtcaaatgcttcaaaagcggaggagggccaatatctaatgtgcccttaagctgtcagttggcccggtttggggagggaagatggcaggggaaggtcggctccacctgccttcctgaaggaaataggaaaatgcatgtgtgttccaggtcacggcctctatggacagtggggcaggtgggacctcaacgtcggtcacaccaaagcagtctctgtgtgatggacagtggcactcggtggcaggtatgttgtccagtagctgattgttcatgcactaaaacaggccccctttccattttgacttgaacatcccaaaggcagcctcagcccctccatccacagtgcctgaccagggccagcccccgaggctaacgtgtccattcacaaccccagccatgcttccgtcactcatggttgccacctccagttctccagaacttatcaaatattttattgttgctgttgttgttgtttgtttgtttttggagcccagcacactaataagctaggctagttttcaagatagtataacgttgtgatttagattttggctctgaagttagaacagaggtcaaatcttagttccatccctttccctgtgtgaccttggacaagttgcttaattgttctttaccttcggtttcctcttctgtaaaatggaaataaaaatagggtatggctcttaaggttgtggaaattaaatgggacaatgtgtgaaaggttattagcccagtgtctgatatgtagtcagtgttcagtaagtatctgttttttgttaaggctcattgttgtgttatttttttcaacaaccatttaatattaatgctaactatttagacaacccgatgagtagagagcaagcatttcctctcaaaaagaatctgttattttattaattatttgtggatattagagatctatgaacccatattggctaaaataccttttgtaaaaaagtggccttttcttggctaatttaaaagataactacattgcaattagctgagatcattaacatgagaggaattttgtgtcgagagtcaaaagagctgtctttggcatcagctttcagaagtcagtgtcttcatagaaagtagctgagatcacatgaaatcagcatggcctctggacacaggagaccagagcttaaatcccaactcttggtaaccaagccatcttgtcaggctcctcagtgagacacattctcttatctgggaaatggggaatgataatttcttcttcacagattcattttaagggtaaaattcattcatgtacgtggaagcactacctggtgtttagaggaagttaattgaatttatatctaagctgaccaaatttctgcaaacagcactcccacaggtctagtatgaaggagttaaaacaaagtcaatggtgtagacattaagcagggctcacctccgatgatagacctaaccagcctcctttccccagtcaccataaaacaacacatcctgcacctggaactggacacagacagtagctacacagctggacagatccccttcccacctgccagcactcaagagccactacaccttggaggtgctccaggtaactcttgtcctgacttctataatgtgttgccctgtgtcagctctgaacattcacttcttaattagtggcagggcagctcttggctggacagtggagatggtgaggccctttgcactggcatgtggggaaaggcagttgctggaaaggagcacttgtcaggtcagcccaggccccattactgctgttgccccttgccccaagcctgtaattttgttttttttttttgtttttttttttgtttttttttgagatggagtctcactctgttgcccaggctggagagcagtgatgtgatctcagctcaccacaacctctgcctcccaagttcaagctattctcctgcctcagcctcccaagtagctgggactacaggcacatgccaccacgcctggataatttttgtgtttttagtagaggcagggttttgctatgttggccaggctggtcacaaactcctgacctcaggtgatccacccgcctcagcctttcaaagtgctgggattacaggtgtgagccactgcacctggccccaagcctataatttataatcctttcttaagaggttgcattaacctagaagcctgataccagtaaagagtcaggaaaagggtctgaaaaactggtctctgtcctcttcaggtatttagttttactagtgagttattaagcttttggggaccggactgggagaatcaggtaggctgaaatggagtcaagttcaagactggaatgttgtctgggaagagccttttcattcttcattgttttctgtccctccaaatacactgtaatccggttgttaattgtataggtctttcattacccataaaaagtaccagtttagagctattgatttgggcagtggattctcctctgaagaacttgaacagtagccttgttgctgatttatcacagcaggtggagtgtcagacgcctgcctgaagtggagagggctgagtgggctgagatgtgaagtcactttagctttctccactaagactatcttttgcctggcatggtggctcacacctgtaatcccagagctttgggaggctgaggcgggaggatcacttgaggccaggagttcaagaccagcctgggcaacatagtgagaccccatctctacaaaaacattaaaaattagcccagggtggtggcccacacctctagtcctggctacttggcagactgaggtgtgaggattgtgtgagcccaggaatcccaggtttacagagagctgtgatcacactactgtacttcagcctgggtaacagagcaggaccctgtctaaaaaaaaaaaaaaaaaaaaaatactatcttttaaaatccagggaacagtccctggacagtatgaattatttactgaatgcctctccactttctctttcagccaatttgacgacactgaggatccctgtgtggaaatcattctttggctgtctgaggaatattcatgtcaatcacatccctgtccctgtcactgaagccttggaagtccaggggcctgtcagtctgaatggttgtcctgaccagtaacccaagcctatttcacagcaaggaaattcaccttcaaaagcactgattacccaatgcacctccctccccagctcgagatcattcttcactcaggacacaaaccagacaggtttaatagcgaatctaattttgaattctgaccatggatacccatcactttggcattcagtgctacatgtgtattttatataaaaatcccatttcttgaagataaaaaaattgttattcaaattgttatgcacagaatgtttttggtaatattaatttccactaaaaaattaaatgtcttttaagaaacattcttttccacttgttaaaaaaattaaatatattttaaagcactttaagaatatgaaactttcatatatgttaaaggattataatttatggaattaaaaaatgcagtgtagtccttaaa

SEQ ID NO: 439 - DNA, 18696 bp, Homo sapiens
  source 1..18696: mol_type = genomic DNA; note = NC_000019.10:40778247-40796942 RAB4B [organism=Homo sapiens] [GeneID=53916] [chromosome=19]
ggaagtggcggtgccgggcccggggagtaggaaggagccggggctgtagccggagtggagcggctgccagccgaggagcaggcgcggccgcggcgccatattgcggccctcagcggccgcgaccgagtcatggctgagacctacggtgagggtggtggacgaagctggggtcctgggtctgggcccagggaggatgcggcctgtgggaatgggcggggctttgtagatcagggggcggggtctggtgtgatggaggcaggacctaagtggatgctgggaggggtttagtgggtctgaggctgagcttaatcgatttaggtggagcctgagggtctggtgcgtgggttaaatagatctggggcgggatttgagggagctggtcctgaggggttcagggaggccctgagggaagaggtgggccttaatggatctgggcggagcctgagtgaaggggcggggctgactgcatgaatggcaggagtcgggcttatgggctagagggaacactgaatggaagctcgggaccctggggctgatctggctggagagagctctggaatgggtttggggatgggctgtccttgagttaggggcaggacttagtggcaaagggtgggacttatgcatgagaatggagccgggttctgggcagagggagggaaggagaggtcgggaagtggaaaatcagtagggatgcaccataggaggtggtgattggaggcaggggaagtgcaggtttaggagtcagagggagccgcattcactcaacaaatatagaagagaagggagaagagtgcaaagaccctgaggtgagaaccagcttgtcattttcagggaatagactgaaggtcaggagctatagtggagtgaatgagtcagagggtggtaggaggtgaagaggaacaagggctatatcgtagtccttgtttaaatagctttcaagagactttagcgacaaaatagctaagatctgggactctggagcccttggcctaggtttgaatctcacttctgcccagctgtgtcactttgggcaagtcagttaacctttctggcctgttacctcatccggaaaatgggaataatttttagtctacctccctcatagagttttcctgaggatgatgtgagctgttgatgtgagtaaagacctttagaactgttcctggcccacaacaacacacaattgacccatgtaacaaacctgcacatgtgggctgggcgcggtggctcatgcctgtaatcccagcactttgggaggctgaggcaggcggatcacctgaggtcgggagtttgagaccagcctgaccaacatggagaaaccccgtctctactaaaaatacagaattagctgagtgtggtggcgcatgcctgtaatcccagctactcgggaggctgaggcaggagaattgcttgaacctgggaggtggaggttgcggtgagccgagatcgcgccattgcactccagcctgggcaacgaaaagtgaaactctgtctcaaaaaaacaaaaacaacgacaaaaaaacccctgcacatgtactccctgaatctaaaataaaagttgaaaaaaaatatatagaatgtgcctggcacatggcaagtactacataagagttatctgttactgttacctattggtttgtttctgcctatgtctgtttctctccctctaactgtgatggttagagagagagattggattggaatccatcttttttccctgtatctttctctccctgtgggtatccctgattttggctccatctggtcagacttcctcttcaaattcctggtgattggcagtgcaggaactggcaaatcatgtctccttcatcagttcattgagaataagtgtgagtttcccgcagtggtcctgggaaccctgagctgtgtttatgcgcatggtgtgggctggtgggcagccggtggggagggcagggctggccataggtacaagtccagtgctggctttttggtccttgctttgtcgtatgtcctttactaggttctccttgacctcaagtcactccagcaaggagaatgggtttgtagagactgagagggccttggaggatgggggatcctctgagctgtctcctctctccctgtactgccccttctgttcctcctactcccagtcaaacaggactccaaccacacaatcggcgtggagtttggatcccgggtggtcaacgtgggtgggaagactgtgaagctacagatttgggacacggctggccaggagcggtttcggtaggtgggctgggctcccaagggtgatggggagagagagtgagaaggaaagagagagatgtgtgtgtagagtcacttggagacactgagagggcagacaaggcagacagagagagatgagacaccgtagttagcaggtatatatatccaaggagagagggagtactggagagataaagagatggtggaagaaaaagaggtaggggccaggcgcaatggctcatgccggtaatccccgtgctttgggaggccatggtgggaagattgcctgagcccaggagtttgagaccagcctgggcaacatagtgagaccccatctcaaagaaagaaaaagagatagagaaaagtggcttgggggtggggaaagggatggagactgagagacaccgaaacagaaagagaaggggaaacttgagagactcacactcagaaaggaaaagagcaagagagacagagactaagagagttgaagagaatgataagggaggtaaggaggcctggcacggtggcttacacctataatcccagcactgtgggaggctgaggcaggtggatcacttgaagtcaggagttcaagaccagcctgccaatatggtgaaaccgtgtctctactaaaaaaaaaaaaaaaaaaaaaaaatcaaaaaatgtagccaggctgtggtggtggatgctagctacttgggaggctgaggcaggagaattgcttgaacctgggaggcagaagttgtagtgagtcaagatcgcaccactgcaccccagccggggtgacagagcgagactctgtctctgaataaataaataaataaataaatgaataaataaataaataaataaataaataaataagggaggtgaggagacacagagaaacagaggtcagaggcagagagggagacagggtgagtcagacaggtgtagttggacgttgaatgaatgaatgcacgaatttacgggaaggcaagggtgagcatgagagccacagagatggaacagaaagagagacagtgagaaatagggaactgaagacacacacgccaaggcaggagaaccgcttgagtccaggagtttgagaccagcctgggcaacattgtgaaatcccatctttccaaaagagagatggagaaatggacgtgttgtgggagagagagagagagaaatgcgtagggctcaacacactgtaggtcttcaggaaatgcctgcagagcagaaaagttgatagacacatagaaaccttaggagaggccgggcgtggtggctcatgcctgtaattccagcattttgggaggccgaggcgggcggatcacgaggtcaggagatcgagaccatcctggctaacatggtgaaaccccgtctctactaaaaatacaaaaaattagctgggtgtggtggcagacgctggaagtcccagctacttgggaggctgaggcaggagaatggcatgaacccagaaggcggagcttgcagtgagcccagatcgcgccactgcactccagcctgggcgacagagctaggctccgtttcaaaaaaaaaaaaaaaaaaaccttaggagagtcggagaaacagagagcagggagagaaatagagggaattcagtccacggaaaagtgtgatctatggcagcatctagtagctgctgagttaattcttgcgtatggattaactgcctgaggtgcacagagcccaaaggcagagagaggggctgaaggatagacaggtgtgtagcatgggctaggtttacggtgagtgcttagtaaatgctgtggaatgattgcatgagttccagaaggacccagactggtgagacagagaatgcagaattggctacactgggaaggagactccacctgacacagcaggagaaggataagcagatgttgtatagtgcttgggcagggccaggcaaaggggagatttgctcagaaaatgttgaatgaatgaatgcacaaatgcatgggaaggcaaaggtaagcatgagagagccacagagatgaaacaaacaaacaaaaaagacagaaatagggaattaaatagggccaggcacggtggctcacgcctgtaatcccagcactttgggaggcctaggcgggcagatcacttgaggtcaggagttcaataccacactggccaacatggcgaaaccccatctctactaaaaatacaaaaattagccgggcgtggtggtgcatgcctgtaatcccagctacttgggaggctgaggcaggagaatcacttgcatccggggggcaaaggttgcagtgagccaagatcacgccactgcacttcagcctgggcgacagagcaaaactccatctcaatcagtcaatcaatcaatcaatcaatcaataaaagacatgtagggccgggcacagtggctcacgcctgtaatcccaacactttgggaggccaaggtgggcggatcacttgagctcaggggttcgagatcagactggccaacatggccaaccccatctctactaaaaatacaaaaattagcctgatgtggtggcgtgcatctgtaatcctggctactcgagaggctgaggtgggagaatcacttgaacccgggaggtggaggttgcagtggttgcagtgagccgagatcatgccactgcaccccagcctgggagacaagagtgagattcctactcaaaaaaaaaaaaaaaaaaaaaaaaagaaaaaggaaaaagacacataggttaaggcaggagaatcacttgagcccaggagttggagaccagcctcggcaacctagcaaagccccatctttacaaaaaatattaagaaattagccaggtgtggtggtgcacacttgtagtcccagacactacataggctgaggtgggaggatctctccgttgggatactgagcctaggaggtcgaggatgcagtgagccaagatcgtaccactgcactccagcctgggctacagagcaagaccatcaaaaaaataaaaaataagacacacatgaaagagacacagagagaaaaacagacgaatggaaagatagggacacagggagagacaaaaatggagattcataaatagagacagctggccagctaagtgagatagaagctgagagaggcgaagagagagggacttcaaggatgcaagaagagagaggaattgcatggtgacccgaccaaggccaggttttgggggatgggccagcagtgaaggggggggcctccgaaccaccagtctgtctctgtagaggggggcattctcggggcagaccccagccttgggggtgactgggtccccctggccccacaggtcagtgacgcggagttattaccgaggggcggctggagccctgctggtgtacgacatcaccaggtgggtgcccggggtgggtggggtagggcatgggtggttcctctcctgcactgcctccctcccttctcccttctccacagccgggagacatacaactcactggctgcctggctgacggatgcccgcaccctggccagccccaacatcgtggtcatcctctgtggcaacaagaaggacctggaccctgagcgggaggtcactttcctggaggcctcccgctttgcccaggagaatggtgagggctgtgtcgtggaccaggtggtggtgggggtggacagtccacagggaccatgggtttactggctctcagtggctgtacccagcaggggaacgtggaggttcagaagtctgggttcaaatttgagtgttggctgggtgtagtggctcacacctgtaatcccagcagtttgggaggccaaggtgggaggactgcttgagcccaggagtttgagaccagcctggacaacacagtgagatcctatctctataaaaaatttaaaaaattagctgggtgtggtggctcatggctgtagtcccagctacagtggaggctgaggcaggaggatcacctgagcctgagagtttaagactgcagtgagctgtgatcacgccattgtactccagtctgggagacagagcaagacactgtctccaaaaacaacaacaacaacaaaacaacaacaaaactaagtgttgccatcagtgagctatgtgattacactggttctcagtttcttcatctggaaagtgggatcacagtgtttctgccccacagtgtgctgtgatgattaagggagattgtggaaagtccttagcacccgccacagagtgggtgctagattaatgttggccgctaaggtttcgcctaccgtcaggaggccgcacagggtattggttttttaaattaattattttatttattttttcctcctaccgcaccttcctgggtattggtttaatgtagagattgcaaccctagatggccctaggtgaaaggcacttttttttttttttttctgagacggagtcttgttctgttgcccaggctggagtatagtggcgcaatctcggctcactgcaacttctgcctcagcctcccgagtagctgggactacaggtgtgcgccacaacgcctggctaatttttatatttttagtagagacggggtttcaccatattggccaggctgatctcgaactcctgaccttgtgatccgactgcctcggcctcccaaagtactgggattacaggcgtgagacactgcgcccggtgaaaggcacatttttgaatacaggagatgggatggggtagatccttgagtaacaggtactggtgttaaggggagtgcagcatactgacaacccacaccaaaaggtttgcaagggccaaccacaatggctcacacctgtaatcccagcattttgggaggccaaggtaggagcatcacttgagatcaggagttttagaccagcctgtgtaacagagtgagaccctgcctctacaaaaaaaaaaaaaaaaaaaaagcctgggtgtggtggtatgtgcctgtggtctggggtactcaggaggttgaggcaggaggatcacttgtgcccagaagttcgaggctgcagtgatctgcaatcacaccactgcactccagcctgggggacagagagagactttgtctcaaagaaaaaaacaaaaaaggtttgcaagtataaactcatttgaaaacattgtgttggccaaaccacccacatctggtggcttgagatctgcctgtgttcccctgttttgcaacctccaggtttaaaggaggttttgccatcagagaggtgtgggtgtgaattcagctctgattttctgactgtggggccttgtcatgctgctgatgggtagactctggttggcctgttcctgtcctagatggtgctagagacacagtgttggagacagccctaggcccaaccttcatggagctcacagttcagtgggtgagggtggaaggacagacccacttccagacagtgacacctcaggaaggtcagggcttgatggtgaagcaccgggagacaggggtcagagccagcaggggagagccccagagggtcagggccagtactgggggggcaggcagagggatcggggtgggatggagaacacaggcagaggggtcagggctgggatagggcaggcagaggcagaggggtcagttgggatgaggggacacaggcagaggagttacatgggatggggggcaagggcagaggggttggggtgggatggggggcccaggtagaggggtcaaggccaagtttgggaggcacaggcagagcggttgcatgggatgggggagcatgggcagagggctcaggggtggaatggggcaggcctaggcagaagggtcaggggtggaatggggcaggtccaggcagaagggtcaggaaaggaatggggcaggcccaggcagaagggtcaggggtgggatggggacccaggcagagggttggggccaggatgaggaagcacaagcagtggggtcagggccaggatagggggccacaagaagctgtgggagccctaagtcggtacctgactcagcccaggaagtcagggaggacttcttggaggaggagctgtgtgagctgagctctgaaggaagagctgggtgggcatatcgggaagcggacattagtggcagggaaatggcatgcgcagaggcctgaggtgagggtaaggggggatggaacattggaggaacaggatgagagtcagcaggtgagagctcagtggagggtggggactaactggggccctgacctcagagtgtgtgcccctgcagagctgatgttcctggagaccagcgctctcacaggcgagaacgtggaggaggcgttcctcaagtgtgcccgcactatcctcaacaagattgactcaggtgaggccccgaccggcccgagtgggagcgaagggcaggcccgggggtctccaggcaaccaatgctgacctctccccttccccacaggcgagctagacccggagaggatgggctctggcattcagtacggggatgcgtccctccgccagcttcggcagcctcggagtgcccaggccgtggcccctcagccgtgtggctgctgagctctgtggagccaggtgggacactgggggctttagggaggcagggcggcctcttgggcatgggggagatggtgtggagatagacactgaacatgtgatgacaagagaaacagagtgagagaaagatgcaaaaacacacaagctaaaggaggcatctggctgggcgcagtggctcacgcctgtaatcttagcactttgggagtccgaggcgggcggaggcagttcattgggtgggggtggggagacagacccacttccagacagtgacagctcagaaaggtcagggccaggcctggctcggtggcttatgcctgtaatccctgtactttggaaggccgaggcgggcggatgacctgaggtcaggagttcgagaccagcctggccaacatggtgaagccccctctctactaaacatacaaaaattagctgggcgtggtggcaggtgcctgtaatcccagctactcgggaagttgaggcaggagaatcacttgaacctgggaggtggaggttgcagtgagctgagatcacaccattgcactccagcctgggtgacaagagcaagactttgtctcaaaaaaaaaaaagaaagaaaggtcaggaccagatggggaggcactgggggagaggggtcagagccagcaggggagaggcccaggggggtcagggccagggtcagggcacaggcagagggatcagggtgggatagggcaggcagaggcagaggggtcaggtgggatgaggggacacaggcagaggggttgcatttgatggggggtatacataaggtcaggagttctagaccagcctggccaacgtggtgaaacccctcctctactaaaaatacaaaaattagccaggcatggtggtacatgcctatagtcccagctacttgggagactgaggcaggagaatcacttgaacccaggaagctgagggtgcagtgagccaagattcagccactgcattccagcctgggcgacagagcaagactctgtctcaaaaaaaaaaaaaaaaaaaaaaaaaagagacatctgccaggccacagggaatccacctgcagccccaggccagcttcctgccctagaccttgaccctcccattcatagttctccagcgatttattgagcgcctgctgtgtgccaggccctgctcaaggcactggggatatggcagggagtacaacagactcccatcctcatggtgctgacattctctttgggggagacaggtgataaacaagagatgtaagtcgactgggcgcagtggctcacacctgtaatcccagcactttggcagggtgagatgggaagatcactttgagaccaggctgggcaacaaagcaaccttatctccacaaaaagttttttaaaattagcgaggcgtggtggtgtgcacctggagtcccagctacttgggaggctgaggtgggaggatggcttgagtccaggtgttcgaggctgcagtgagctgtgaccatgcgccactgcattccagcctgggtgacagagcgagactcttaaaaaaaaaaaaaaaaaaaaaagtaaagtatgtagtagtgagggaggtaagaactatggggaaaaataaaacaggcacagatgagtggatagggtggaggagtgtacttttttttttttctttgagatggggtattgctctgttacccaggatggagtgctgtggcgtgatctcggctcactgaaacctccgcctcctgggttcaagtgattctcctgcctcagcctcccgagtagctgagattacaggcgactaccaccatgcctggctaattttttttaatttttatagagacagggtttctttttttttttttttttttttttgagatggagtcttgctctgttgcccaggctagagtgcagtggcacgatcttggttcactgcaacttctgcctcctgagttcaagttgcctcagcctcctgagtagctggaactacaggcgcccgccaccacgcctggctaatttttatgtatttagtagagatggggttttaccatattggccaggctggtctcgatctcttgaccttgtgatctgcccgcctcggcctctcaaagtgccgggattacagtgtgagccaccgcacctggccgacacagggtttcatcatgttggccaggctggtatcaaactcctgacctcaagtgatccacccactcttggcctactaaaatgttgagattacaggcgtgagccactgcgcccggccaagaatgtacttttttttttttctgagatggagtttcactcttgttgcccaggctggagtgcaatggcgcgatctcagctcaccgcaacctctgcctcctaggttcaagcaattctcctgcctcagtctcctgagtagctgggattacaggcatgtgccaccacacccagctaattttgtatttttagtagagacggggtttctccgtgttggtcaggctggtctggaactcccgacctcaggtgatctgcccgcctcagcctcccaaagtgctgggattacaggcgggagccaccacgcccagcctttttttttttttttttttttgagacagagtctcactctgtcgccatgctagagtgcagtggcacgatctcggctcactgcaacctctgcctcctgggttcaagcaattctcctgcctcagtctcccgagtagctgggactataggtgcgtgccaccatgcccagctaatttttgtatttttagtagagacatttcaccatgttggccaggttggtctcgatctcttgacctcgtgatccgcccacctcagcctcccaaagtgctgggattacaggcgtcagccaccgcacctggccaagagtgtacatttaaacaagatgaggagggaagcctcgctgagaagatgacatttgagtgaaggaagggagatagggaggcctgtggggatctggggcaagagcactgctggagagcacagcaacgcttctagcgaggggtatgcctggtgtcggtgagggtgaccaaagcagccagtgtggtcatcatggaggacctgtgtgtgttttgtgggtacagcatgagatggggtcaggggttggaggaagcagatcagttagggcctgtgggccctggggaggcctctggcttataccctgtgtgggagccatgggaggcttctgaacagaggaaggacaggatcagattcaggggtgcagagagttcctctggctgcataaagggaaggggctgtgagggacagaggaggtcaccaggacaccagagaggaagctgctgcaaagtccagggaagatggtggaggacaggacaagggggcgggaagaggagtggctgagaagggaatagggttcatgtcctccctagactctctgtcttccagtcttggcctctctcttttttttttttttggttcctgtctttttattttgagacagagtctcgctctgtcacccaggctggagtgcagtggcgcgatcttggcttactgcaagctccgcctcctgggttcatgccattctcctgcctcagcctcctgagtagctgggactacaggcacccgtcaccatgcccggctaattttttgtattttttttagtagagatggggtttcacggtgttagccaggatggtctcgatctcctgacctcgtgatcctcctgcctcggcctcccaaagtgctgggattacaggcatgagcctttcctttttttttttttttttttttaattttagagagaatctcactctgctcactctgtcacccaggctagagtgcagtggcgccatcttggctcactgcgacctccgcctcccgggttcaagtgagtctcctgcctcagcctcccaagtagctgggattacaggcatgtactgccacaaccagctaatttttgtattttttttttttttttggagatggagtctcgctttgttgcccaggctggagtgcagtggtgcagtctcggctcactgcaacctccgcctcctgggttcaggtgattcttctgcctcagcctcccgagtagctgggactacaggtgcgtgccaccacgtctggctaattttctgtatttttagtagagatggggtttcaccatgttagccaggatggtctcgatctcctgacctcgtgatccacctgcctcggcctcccaaagtgctgggatgacaggcgtgagacattgcgcccggccaatttttgtatttttaatacagacagggttttgccatgctcgtgaggctggtcttgaactcctgacttcaggtgattcacccgccttggcctcccaaagtgctgggattacaggcctgagccactgtgccctgccaatcctgtctccttttgatgcagccactgggtctttctaacacacatatctgctcctgtcgctccctttttcaaaaccatccatgcatctcagggccccaggacacaaatgaactcctcagcctggtgtttgaccctctgcagggactggcccctgccagcccagccttaccggcctcagccacttgtcggtctccctacctctcaggccactccagccacactgaagttcttcccattcctctgggcccttgctcatgctgggcctctgcttggaacattcctaccctcttttccctggcaacctccttcctccaggcagcactacttgttcctccaggcttggtccaaacttttgtttttttttgagatagagtctctgtcactcaggctggagtgcagtggcgtgatttcggctcaccgcaacctccgcttccaggttcaagcaattctggtgccccagcctcctgagtagctgggactatgggcatgggccaccaacgcctggcaaagtttttatatttttagtagagacagggtttcaccacgttggccagctgctcacaaactcctggcctcaagtgatccacccacctcagcatccaaagtgctggaattataggcatgagccactgcacccggccccaaacttcttgacaggctttcaaaaccctgcaggatttggtcccatccctccttctctgggggatgtgtatgtcttgccagttctcccttctatacttcatgctaaatcccctcccagcccttggcagctccagggtgggacaggtggggaacaagtggttagaccttggatctacttggaaggcagagccaacgtgatttcctgatggaatggatgtgtaatctgaaagagagagaggaatcaaggatgatgtcttcagacagtgctctcttgtctttccaggactttgcacctgctgtgcctgagcctaagtttgctcatctgtaaaatgaggctaataatagcacctgcttctatagatgttgagaagaagaaatacattaattcacgaaagtgctcagaatggggcctgatggtcaagacttgatcgatgagggctgtttttaaagttttcttcttatccatctttgggctgagctcaaatgaatgggtgtgtcttcttcacctcagggcttagcagagactctgtcctagagagtttgccctcagtaggtgaaatgtaacaaggcaaggcaaggctttttcacactttgctgactgcaatctacaggaggaaatatattttatgtgttaatcaaggactgactgtagcagatcccacccacatataaaactcaaacacacattttcctaccaccagtattctttcgtttcttggcactaaaatgaaagtcacataacatacatttacgtgacttttcaaagtgtacaattcagtggcattcagtacattcacagggttgtgcaatcaccacttctgtgttgttccagaatgttttctttttttttcttttcttttttttggagacagagtctcgctctgttacccaggctggagtgcagtggtgcgatcttggctcattgcaagctccacttccagggttcaagcaattctcctgcctcaacctctggagtagctggaattacaggcatgcaccaccacacccggctaattttcgtatttttagtggaaacggcatttgaccgtggccaggctggcttgaactcctgacctcaggtgatccacccgcctcggtctcccaaagtgctgggattacaggtgtgagccactgcgcccggcctcagaacgttttcattactctcagaggtgccatgcttatactgctttgtaccttatacctttgtacccatatttattaagcagtcactctccatttcccccaacccctagcaaccaccaatttgttttctgtctcttttggccaatatgatattcttttccttttccttttttttttgagaagggtctcactttgtcacccaggctggagtgcagtggcaccatctcagctcactgcagccttgacctcctgggctcaagtgtttctcccacctcagccccccaagtaactgggactactggtgtgcaccaccacgcccagctaatttttatatttgtattttttgaagagatggggtttcaccatgttgctcaggctggtctcgaactcctgagctcaagtgatccacccacctcagcctcccaaagtgctggaattacaggtgggagccaccatgcctggcctcttttccttttttcttttcttttcttttttgtttttttttttttttttttttttagatatggtctcactgtgttagcggggttggtcttaagctcctggccttgccgggcgcagtggctcacgcctgtaatcccaccactttgggaggctgaggcgggcagatcacgaggtcaggagttcgagaccagggtgaccaacatggtaaaaccccacctctactaaaaatacaaaagttagccaggcgtggtggtgtgctcctgtaatcccagctactcagggggctgaggcagaggaatagcttgatccctggaatcagaggttttagtgagccgagatcgcaccactgcactccagcctgggcgacagagctagactccgtctcacaaaaacaaaaacaaacaaaccaaaaaaaccaaaacaaaacaaaaaaactcctggcctcaagcaatcctccacctcagcctcccaaagtgctaagattacaggcatgagccaccgagcccagccaaccaatataatatatctttttaaattattattattattttttgagatggagtttcgcttatgttgcccaagctggagtgcaatggtgtggtctcggctcactgaaatctccgcctctcaagttcaagcgattctcttgcctcagcctccctagtagctgggattacaggcgcccgccaccacgcccagctaatttctttgtatttttagtagagacagggtttcaacatgttggccaggctggtctcaaactcctgacctcaggtgatccgtctgtcagcctcccaaagtgttgggattataggcatgagccactgcgcccggcctatttacaaaatttttttttttaaataatgttttaattttgtagagatggtgtctatgttgcccaggctggtcttgaactcctgggcccaagtgatcctctcttgcccttgcctcccaaagtgctaggattataggtgtgagccactgtgcctgcccaaccaatagaatattcttattatatatgatgcactctggtatttgccgttctgtgctattctgtttgaatttaaaaattggtcaagacccaccaaactgatttccccaccaaggcagtgacacacattagaatgacctggagaattttaaaagatactgatgcccaggcctcaccctagagattctgaagtggtttcaggactttttcttaattaaaagataaatagagatgaggtctcactatgttgcccaggctggtctcaaactcctggcctcaaacgatttctcccaccttggcctcccaaagtgctgggattaaagacgtgtgccaggctgggcatggtggctcacgcctgtgatcccagcactttggggggctgaggcaggcggatcacaaggtcaggagatgaagaccatcctggcttgatctgtagatcaagtgaaaccccgtctctactaaaaatacaaaaaaaaaaaaaaaaaaaaaattagccaggcgtggtggcaagtgcctgtagttccagctactcaggaggctgaggcaggagaatggcgtgaacgcaggaggcggagcttgcagtgagcctagatcgcgccactgcacttcagcccaggcaatagagcgaggctccatctccaaaaaaaaaaaaaaaaaaaaaagatgtgagccagccagttgcaggatttctggaagctcccaggtaatgctatatacaaccaaagtgagaaccactaacctaacgttgtctccccagcttggggaacagtgaaatgagacttagagccagggtgatccaggaacatagagggacacagaaagatacaaaggcaggttcattttatttatttatttatttatttatttatttatttatttaaattttttgagatggagtgtccctctgttgcccgggctggagtgcagtggtgtgatcttggctcactgcaacctccgcctcctgggttcaagtgattctcctgcctcagcctcccaagtagctgggactacaggcacctaccaccacgcctggctaatttttgtatttttagtagagacggggtttcaccattggccagggcggtctgaactcctgaccttgtgatctgcctgtctcggcctcccaaagtgctgggattacaggcgtgagccaccgtgcctggccgatttatttatttatttatttatttattttgagatggagtttcgctcttgttgcccaggttggagtgcaatagtgcaatgtcagctcaccgtaacttctgcctcctgggtttacaagattctcctgcctcagcctactgagtagctgggattacaggcatgtgccaccacacctggctaattttgtatttttagtggagatgaggtttctccatgttggtcaggctggtctggaactcccgacttcaggtgatctgcccgcctcggcctcccaaagtgctgggattacaggcatgagccaccgcgcccggcctatttatttttttgagacagtctcactctgttgcctaggctggagtgcagtggcacaatcttggctcactgcaatctccacctctcaggctcaagcgatgttcccacctcagccccccaggtagctgggactactggtgcatgccactacacctggctaatgtttgtatgtttttgtagagacggggtttcgtggtgttgcctaagctggtctcaaactcctgggctcaagcattcctcctgccttggcttcccacagtgctgggattacaggcgtgagccactgcgtccatccagattcatgatatttagatgttgaaatgtggctttacagactcagacagctctctgaggcaaacaaagagggagatgcaggtaccctcagcacaagccccaaattacctgcaggggagaggcggaaaatcagacaatgtagaaaccgggagaagaaaggtatggacagaccgatgcagataggaggggaaggaaatacctggaaatgagatagagaccggctggacagaccccggggaccctgcaggtcaccacacccttctctttcagctcacctgttctccaggaccagccctgctggggcccaggcccaggctctgagaggccgtgtcctaacctgccctggccccggagaagctacgttgccacctgtcccccttccctggcctggtggggcctggctttggggcaagactgagccacgggggaagggggaatcccgtacctgctgctgcttcctctgtcttggctaacgtctgtccccctgaacccctaaccataccccaagagctcccaaagcctgagaccagggtcatttgtccccaactccccatctggccctgctgttgctagtacctgttatttattacctggaggcctgtccagcacccaccctacccccataaagcattgtttacacctg

SEQ ID NO: 440 - DNA, 146805 bp, Homo sapiens
  source 1..146805: mol_type = genomic DNA; note = NC_000014.9:c88326912-88180108 KCNK10 [organism=Homo sapiens] [GeneID=54207] [chromosome=14]
acgcggcaggcatcgtctcctccggtctcacagctaccccgggctggagcgtggggagggggtaagggagccagccaactcggggaaacttcgttgccagagatgactggggttttcgggctttcccagccttcccatgccgggccacacggcattcattaaagtggtggggcaactattggtgcgctccagccgggcaggttttgagctgcagagacccgtgcccggtagcagcgctttgccaccgagtgcacccaggacgcagtggccgccagcccgggtctcctgctgggggccggcgagtgcagggagactttgcgccacgatgttttgttttcctgccgcaggaacgctaggcagtctctttccaccagacttaacccgcctgaagcaatagccatggaagttgcggcggcacagagggagacagaaccgcttggagcggcatctttcttggatgttttttctctacacagacttctttctttccttgggtaagtgaagtccagcttgtaaataaccaaagggtagaaccgaaggggatggagggggattgcagtagcccaaagggctaagttttcttgggagggaggtctccctccatccccactccatgcagtccactccaaatacgcagttgaggaggagttgtgtttgatttcagacacgttttgggaaacggtactgggatttatttacctaattttggtggatttttttttgggggggggcgggtaacttgcttttgtctacattctgagaaaggagaatgaaagtggaggtgagagaaagctccagaggttggaggtggggaaaagaaaggagggggcggcatccagtgattaagcagagagatcatcccaagggccaatgactagtgcaagtcttcaaggcagaccaggagcactagacactgatcctgctccctgccctaatagagtctacccccacctccccatccccaaccctccccttataaccatcctgctgttgccattctggggaaggtcatcactactcagggccccaaataacttttaatggggacctgcaacctgtcttgtacacaagtgatgctcaataaatgtttgttgattggccgaatgatgttgcatcctaagggtgcagttcctgccacaggaatttgccttggacagtgaactaattccccaatgcagaccccagaacacaaccataggtcagttcattttgcaaaggaggagggcctggaggcttggaaaatatcgtatttagaccttcattacccaaacgaacccatgggacaggttcagggtcagattcatgggtcccgggactggatgagctcacaaggttctggcatggagagcatggacctttgtgtcaacaaacttgggtttgaatcctcatatcgtgaccttgggaatgtttctttatctctctgagccttgatcttctcatctgtaaaaggaggccagttacagcttctgcaaaatgatctaacaaagatgaatggagaggaaatatgagatggtgagggggaattcagtaaatgtcaatcttgcctccccgtgctctgaggactcaggagagggtgtctttctctgctgaagcccctctctgactctgatgcatgtaaaaaacattgtattgcagtgactgtgctagagtccagctgtccgtgaacagttaaagagaagagcgcagagggaggttcgaaagcctttcttagaagcatctccctctggacttgagaacagaatttacatacacactggtgtctcggggcatggctgggagaagcagagattccttgtttgtttgatttctatgtcttagccatcctcccagtcctagtagagagaggcaaagtgtggttacagagtccagggaagatggttctgaagcacccgggaacctgcctaaagggctgaagagtcagagtagcaccatcagattggtaccagttttgcctgaacggggtttgcagagaattcagggctccagcctggggtgcctgtgacagcccagtgacaaagcactcacctttcccacagaccacagcggacctctgtaggtcttgctcttggactcagaaaccttgatgtgatagtgacggatggatggtgagaaagatgctgctgacatagggctccccagaagcctcaaggtgccgtagagtagcatgcaacttagagatcagctgctagtgtgggattttaggaccccagctggcaggcataggaatgagctgggcaatttctatgcgtaagtaaaggcaacaacaatctaacaggaccttatggcactagatagtaagccccatgaaggcaagatctctgtcttgttctctgccatatggccagcacatagcacagtgatggcacttggaaggggttcaatatatatgttgaatgaacaacaaattttagtaaccttatctggaagccagagtaggggtttaaactacttcctatccaacactgcagcatgcaattcatgtcttcatttagcaagtatttcttgagcacctactacgtgtaaggctccgttgcgaggcatccgaagcaatttgtcagcatcattcatgttgatactcggagtgacccgttcaagagcacctcagcaccacctggcttttctgaagactgaggccccaccacaaacccctgtggggcttcaagcaggggcagtgagagggcgttagacgaatgctccaggtttagcccctttccgggaacaggtctgggtcccttcgcatctgccctgctggtcccaggatcccggggccgccgcttccgggagctgccgggtcttggcaactccgctttcctccgggggcccccgtgcctctctcaagcctcctttccagccaacgaccagcggccccagtccggctgcaggtagctggggaagggaccaagctgtgccttgggagcgagcttccccgggcggggagagcgcagcagatgcggagcggtcccagaacaaaaggctcatggctggcacgggcctccttggagtgcggcggggacgtgggttcgggactcaggcgagagagccagacgcgggaggaaaaaaaatgaagtgagaaaagagaaggagggagagctcagggtgagagcggtgagaagaggtgacccggaggccgaggtctgcggcggagccgcagcggcccttcctccgcctcctgcagcgccttccaggcaaccaagcgtgtctccggctgcaactccagcaagcgcgccgctgccgcctccacgcccgcccgccggccggccgagccagtaagtagcggcgcgcccaccgctcgttccccgcccctccgcggcttccccgccaccgcccaccgcctcccgccgccccgcgggcaagtccgcgaccgcctcccgctgccccgagccgggtgccgggggctcagcgcgccttcccagctgggagcctcggtccgctgctcgccctgctccctcttgccggggcgcggcgtctggggcgcgccgcggggagggtcgccctcgccgcgcgctgcccgggcgccgcgccacccctacatccaatggctttcggggagcgggaagtggggggcgtcgccgggggcgaggagccgcggccggggtggggcgtgtgcgctcagcgcggccgagcgaggctgacgtgcccgcccaagcgcgcgcccgggagtgtgtgtgcgggtgtgtgtgtgcgggagtgtgtgcgcacacgccttcgggggctggagtgacactgcagtgggcttctccgtagccccagccttcaggctgcgcagcccctaacctgccggcaccgcttttgggaagcagcttggctcttccatctccccaagccttcctctccatcctttcatccacccctcgccgatcttactttttcttttacccacggggccgcggccggccaccccctggccggtgcaaacacccaagccctctccagttctcccccaagctaatattttcccacctgtctttttctggggttcctccacgagccagtccaaggctcccccatcctcggaaattgttttgttggactgctaaaccgaggcgtgtaaagcttgaggactttattattatttgggttcttttcatttcttccccttctgggcaacgaagcaatgaaatttccaatcgagacgccaagaaaacaggtgaactgggatcctaaaggtgggtgtttcctacttttggctgccctcgccctgcctctgtctccggcgtgtgcgcgcttccttgagtggaagcactcttgcttctggcagcgtgtgtcctgaggctgggaaatgcgcctgggaactgcagcgcgggtgggaggagggcggaggcagcgtgggttccgaacccagatagtgcctgtcattaccacataatcattgtccctcctagattgtctccagatctatttagatagaccaagccgactgtttggtttgaaattgcaagtgtcggtatttgcttttgactttgagtgtgcgagtgtgtgtgtgtgtgtgtgtgtgtgtgtgtgtcctttgtttctggtgatctttgtctctctggcagatgggtggggtgcttccccctggacctggagctgcgccgcatgcccgggtgtcctcagtgggaaaggtttcctggcagcaagtggggctcgagttgcagcagccgtccctaggggtgggccgttctcgcagggcatgcagaataatggagcccacagggcctcctgagtcttcgttcaatcttattaccaaacctagcagctagttaggctcaggtcagagtagaagcaggaggaggggtggtttgtgagaagggtggggctggcaaggcataggggaggggcacgaagtgtgcccgcccaagcaatggtgtggtttgcatgcttttacgaatgttggaccaggtttcatccacgcaaaagggagggattaagacggatttgtgtgtgcctagcgtcggccaccgtgtctgtaattagcatacagatgttaaggctccaagggagtgatcagtatgagagcagaacaagttggaaccgcgtgtccagttgtgacaagaatgctctttagcatttcttgtagctcatctgacgactgtgtcaggctaggcaacgcctctgtgtgtattggaattgaaatttgtttatttggggtgcgtgtgtgtttaatgttctttatgagcgcatttcttctttttctccagactggaaagaagaaaccatcttatttgttgagtaaatgtcttaggaattgactggctattgaagagtgagtgaagagatactgcctttttaaaacactgaggctgttacatcttaaatacagcccaaaccttctattttgtctctacttgaaatctctggaaatatggaggtgtgcctttgcttttttggggggagaatccctgaaaagcatatttgttaaatacctattacatgctaaacactgtcctaagctctggagatacagtcagaacaggaaagataaaagctctgacttggagtttacagtgagggagacagacctaaatcaattccatggaggaatgcataattcaaagtttatgtatgctccagggagagcatcagaggtttaagaaagtgtctgatagaagagattgacaaggaccagagaaggcttccctgaggacatgacacttggacttaggcctggaggatgtataggagttaattgtctaaggaggaggggaattgttgcagaagagggaacagcaagtgcaaagggcctgaggcagaagaggtatgtgtatatgatgaactgaaaggaggttcccatggctatggcagagtgagtgaagaggtattgccttttttaaacacccaggctgttatactgtaaatacagcacaaacctttcattttgtctctatttgaaacctctggaaatacggaagtatgccttggctttcttttgggaaatccctgaaaaatgtatttatccctagcagagagcaagagggcttgtgttttgagatatgactgggggatccacaggcgagacgcccccctccaagccctgtgttgttggaggtggggtagcattgtggggttggaagagtatagtatttatctaaagccaatgaagagtttcaagacgaggagtgacatgatttgagctaagtttcaaaacaagtgctgtgtggctcttgtggatgtaggggaccagatacaatggtagcatgggccagggtggttgctgtgggcatggagaagcggacggagtagagagctgtagaggacgtgaaatcaacaggctttgcatgaataatgtgtggaagtgaagtgaaggaattggaatgactgagatggcagccagggcaggaccagtcttgaaggaaagctcatgagttcaatctaggacttgttgagtaggacatgtccccaagccatccaaggggtgtgttaggtgggcagctgtctaagtgctggggtcaggatcttcaaggaacagagggagtaccgtgagactgattttgtgaagctggctttgtgttttaaggtacatttctgtgtgatcatcattctatatattcatgttacagtgatgaacacagacaaattttacacattttacagcctgacacagtgaagaaaagcatacaaatagcaccttcagttacaaccagtggtgctaaaaatgaaaaaaacctcaataaaaataacaacatttaatgagcaaccattgcatgccaggtgctttatgtacattgtttcatacaattattttcacaatacttatctgatggtataagtgttatagttccatttggcacttgattgccatcatgacaccactaatctgccttccagtggagttgctctgactttgtgcacagttattcccaaaggtaggggtgacagtagtctttttctagccaggggatggaggagggaagagagtgaggagtgaggtggcatatctcttatctgtatagaattatgtgctaggtgctcttctaatgttttacatgtgttaatttaatcttcacaaacattttaggagaaaggtattatcctaattttacagatgagttaactgaggaacagagagtttgagtaacttgcccaaggttgcacagctagtaggacaagattagaatctgggctcttaaacactcttcaagtctgtgtttcttattgggacttttggcttttgcctggtaaggttcccaaagctcaggaagtggagaagcttgttgcgaggaggaaaaggagaagagagaggatgaagaggaaaagggaatggaataggaggaggataaaagagaggaagagagaggaggaaggagaagaggagacagtggctcaagcttaccctacttgttcctttctctactaacctattcagacaataatcttttcatttccatgtctgatgggcaagtcagtgactactggacagagtttgggtctctgttttggaggttctggattacacagaccaaatgtgtttagcagggaaaagatgaaggggagcccagcagtattaggggaaagtggagagacagttcacattacttggactgtaggatatgtctatcaacagacatgacccttcaggcggaggtgctctcatgggttctggaaggcagttgtaattataatgtttttcttacagccttattaccctacaatttaatagcaaaaaatgaaggtggtttgagaatagattggtttggatagcatttgggtggattaagcaaagcattgtcaagaggtgtaggtaaaaacaagacccaaatataaaatggttcatctctggtgagctatggccttccttcatattcatggaacagagacttctatgaagagcgttactgtttgtgtaggacctaccacaagtagattggttctaagtcttagctttcatagcagaatttacgtgcactttaaatcatcagcatcatttgttgatgattttctgcttaaaattggtatttacttgctgcttatgtgtattaagatctttttaaaaccagtgagatctgcaaatagtattcctctcactagaggcaagcagatgaatacagtgtaaaaaaactttggatttgggggcaaaataattaggttctaaaagcagctgtagcaatacttagtggtatgactttgggctgctcatttagcttttctgggtttcgcttcccttccatggagaaaggagtcattgcctttgtctacctctctgactttgtctcttcaactttccccatcttgatctgatcttggggccagttggcttcctttcattcctcaaatagatcacacttgcatctgtctgagggcctttgcgcttggaattcccactgcttataatgcatttcacgtagttggctcctttctgtcatttgaatctcagctcagatgtcctcttgttagcaagggattccctgtcttatctgaaagacctctcctcctgttccccagcaccatcattttctcttgtgtcacctattcgattgtcttactggcacttgtcatgatttgaaaccatctcacttactcatgggtgacatttgatgccagcctcctttactagcatatgaggtgcatgagcagggactttctctgtcttgtttattgccataaccccagtgccctggaaagtgcctggcactcaataaccctttgctgaatgaatggaaggttggcaggatggactggagaggactgaaggctttatgcctcatggaaattgcaggacgcctctcagctataaatggcaaagtacaaataaggagaaaggaagaatatccccaaatagtggcatatcagaaaggacgctgatattcccacttccttgcaagctccagctcgctctaaacctccagtgcgctgttttccttcttttctcgtctttgacccgaagtaagaaggctgaatagaagtgcagtgagggtggatgggtggactgatctagcctgctgaagatatggtcagtgtccaataaataatttggctcatattagctattggagtgtggctatttttaggcactttaatccacttaagaaagaagcaaagctctaggagtggaggtggatttttttttaaatgctacacttttagtgcacactttaatgcaaaattctggagaagcccataccttatgtgcatagcacctttcagtttacagaacactttttaggaatgatctcatttgtactttaaaaaaccctatttttgtagggattagagtcttagatttactgacaaataaagcaagatgtagaaaggataaatgatttatgtgggagcccaaagcaacaaacaggcagagctggggctaccctaggccttttgatgcttacgtccatgacagtttccttcaagctttccttcctcccagcgactttgttcattccacactctcctgctctttgttacccaaaagtgtgttcaaaggtttctctgagagatttagaggaagcagtctccctgttgatcagtgaatctttagttgatggctattttcagcaggttgtgcttattgtacaggtctacactttcattctatgagctcaggtgaagacccttagatcttccttctgctgtactggctaaaagaagattttggtcttttgtgaatgggggccattttcaacttgctaggttgcttaagtgctagctttattaacgtgtttccaaacacacatttgcggagcttagatttcctggaaagaaaataatctatttttgatttaatatccaattttcaggagatcagtgttccaaatgggatttaaaatgtgccaaaatcaccacaattatcctcaaaagtaccaaggaacagtgttccaaagactgtcttggccaagatttggttcaggcttcttttccagcagtgtctaaggagcttcaccatcctttttgctaatcccagtgatcactgggttgaattaagactgagcaggttgactttgctgttccacaccatttccaaaacatctgtactttggctccatatgaaccccaccttaaatctgatgcatttaaaaaatataatatagtctttcccctcattaggaaacttcaaccacaactgagatatggtgtgaagtatatttaatataggcacagtgagctagtgatttccttttgacttttagtctacaggaaattagaggaagagtttaatgataaaatggaaagaagccattctactgatagccagttaggaagtttcagtttggacagctcccttggctgatgcagaaaggtggataaaaatgacaatctttttcagtactctgattcttataaagggcacctactggatgatccagatgaggttagagtgagttaggggcttagctctgcatggcatgtttacagaatctacctaaccatggcactaggagtgtggtcaccctgttggttccacccacctgggtgatttctctccataagaatcatggaggtcaaagggaccttccacttctggggtctggtcctaggggtactctcagcggagactttacagtttatctatgtctggctcattaccatcacctacaatggggaaataaagacctcatatttacttgctagaacatctatttgtcatttgcagccacagtttaagagttttttttttctccctgtgagtgtctaggactgagtactctgaattgaaaatgaaacctgacttcctaatcctccatttagggttgaagggagggagtaagggtcataatcactggcaggggagggcacggtcatgagggagcattgcattcttttcctttgccattcccagagccagggagatggggaggggtgggcattggaggtagtggggatgaggctgggagatggatgggatttcaggagattttaggttttgtattaccaataactgctagtctcatcacttaccctttccatggaagtaactttgaagcagagtggaatggtggggaaacaagattagaaaggaaaacataggatttactgccatacataagccaggtgatcacagggaacttttccttcattcctcccgtccttcttttcttcattcccttgttccctccccaccgccatccccccaaatcctgcagagtcttgatctcaattgctctcgcttgtgcaaagggtcctttctcccttactcaactacccagtgtggtggggctggtggtatttacagtttaaaaagagttgcttgaatagaaaatgaaaatttggtcgggtgatggagagcctggaagtcacggtaacctttgcagacgcctaaaacaccaatattcataattttgacatgcaagctagcaacaattttactaccaagaaaatgagtttcttatgtgcaagcagaactcgagatcccctaaataatcacacaccaaatatttagcatgataaagataaatagtatagcttactaaatttaatgtgatatgagcctgacaggcagaatagagatgcttgatattaggtgtgataaaaggtttgacatccaacattcacttacttcgtcctctgagacaaaagtcaggcaccaagtgtttaagaaaaattgatgggaggaaaagcttagagatgaataaagtctatttattaatttatattttcctctgagaactggggagtgttgttacccatgttaactgtggactaacctgggccagctcctggattctactggctaagaatgttgctttaggccaaaggaatttatccctcatggtggaatttgaggccatatgggaggtgattatgatagatctgtttcggcctctacattcttacaataacctgaaaggagattaaatacatgttatagtcatttaacctagactccaggcaaaatgtcaccctctgtacagtataggagcttaggataggagacctggtttctagggctggcgctgccactcatttagaaaaggagggagttgagttgttggttgttgagatcccttccttccctgatagtcttagattgcctgagtcctaatccaagcatgatttactagaggctgatttgggaacattgcttcatttttctgtgacttggtatcttcatctgcaagatagggataattacagccattacttctttggtttgttatgtggattacataaagtgatacatgcaaagctcttagaagaatgccggatcatcatgaaggctccatgagtggtacctgccttgtgctgttctcacagttgcaggaggcagcctgtgaagtcagggtagcctccagctcagcctcttggaagcatctggttcactgtctggatcatccaggaagtggtccatagcagagcacaaccctcctgatactctggaagactcttagtattcttagttcagatttaaacaacctaggctgtcctggttaactcagagaaaagaccagtgaaagaacatggcttggaatcacaatatttgagtctgagttaatgtacccattttattagcagtgtatcatagttgatttcggctgctttaataaaattccataaactagatagattatagacaacagaaatttatttctcactgttctggaggctgggaggtccaagatcaaggcactggtagatttggcatctggtgagggcccacttttcagctcatagatggtgccttcttgctgtgtccttacacggtagaaaaagtgatgggtctttcttgggcttctttgataagtgcactaatcctaatcatgaaggctccatgcccatgacctaattaccttccaaaggccccatctcctaataacattacctttggggttaggatttcaacatatgaattctggggggacacattcagaccataacactgtgtgaacttggccaagtcacctaacctttcctagcattagttttcttttgggtaaaataaagatcacaataacaaccacttcacagttgctgagatgatcaaatgagacaaatgtgaataaacttcataaactgttaaattccagaccaacatttcccaaaatgtgttctgtgagacataagctagactcatcagatactctgagaagaaaagtggtgtcatggtaaagtcagtttgcaggatgatacgtgctcagtcattcctagagagtcatcatgcacgttagcatgttactgtattattgtgtaacaaataaccccaacatttagtggcttaaatcaatataaacatttattatctcataagttctgtggatcaataattcagggatagtttaattgggtggtctgactaggagtctgtcattgattgtggtcagatgttgtccgggctgctgtcatctgatggcttgactggggcaggaggatctgtttccaagctggtgtgctcatgtgacttgcaaattgctgctggttgttggggagagggctcatttcctgccaatgtgggcctgtccatgggatgcttatgtgtactcatatgtgacatggtggctggcttccccaagaacaagtgattcaagagagaacaaggtggaattggcaacactttttatgacttaacttcaaaaatcacatattgttaccaccaccacgttcttttcattagacgccagtcactaaagttagtccacatctggggagtggtgggggtgatcacattcacgttggaagggagacatgtcaaagaatttgaagacatattgaaaaatcaccgtaagaattttttcctatcatttattgaataggcaccacgtgctaggctaaatgctttgtagttattatctcatataatcctattcataatccaaagaaataggtgaaattattatctctgctttctgaatgaggaggctgaggcctatagagcttaagtaacttgcccaaagttacctagtcatgctacgacttgaacccgagtctgtctgatttaaagcctgaactcttacctctgcctcatatgcctctctctgataatcctgtagttcagaagtctgtttaattttgtttaagcctgcattttctacttaaccacagaatgatgattcatttaactccatttttaccctttcatttaccaacggcttgaaacattattctagaaagacagtgagcatgatgatgatttatgtataatatgaacatatggtctcataatagatcccagcatacctatcagtccaaactttttgtattattcaaatactggaagtgtctattttgcctgtcttgtgtgggcaccatctatgtgtaaatctgtaaacattaatttaaaaaaaagaccccataatccaccctattttttctgactgtgaaactagaggtggggtgtgataactcatggtcccacttctcttacagagtccctttctttgcaatgtcccttcttttacagattcagtgactgacaacttaactttcttgggtaaagccagaaaaaacaggatggcctccaggccgagcagtagaaatgctggggaatggggtgtctggtgtgtgtctggtgtgttcctgcagtgcctgcaggccatgtgtctgtatggtgactgaaacgcaagtcggcatccagccaggatggcagggaccgtgtgcctgggggtgacggcaaacacacagtgagaagctgctgatggagggaggaccgttagcactccttgtcatattttgagtaaacatttttttacaatcttgttgctttttctgtacagtcttgagaaaatgatttccaggaagcaggatgcatccaatgacttagaggttcccatgtttccaaacattacatgcctggcttattcctgaggcagttttgtattctgaaggaagttttggagcttctgtgttctgggcagaggcgagtgaatatggtttcttttgagtagcaccgtggacttgagaatgatcaggagctggacattgttgaatatgtcacttactgcacaaaatggcaaagacagggtctgggacagggtgagagtgtgttgaatggagatgcctggggccccagtcacattcaggagccagcactgatggcatctgtaaccatagtaaccaagagtggaaaaagtctcaggatgccaagacgccactgtgccccccttctggttctgttgttttcccctctattctttcatccagaaattcccccatccctgcccccaaccaccctgacaagggactgactttcagggtggtttctacactggtgattttaacttcctactaactcaacacttcctgtagcccctttttcagttctgagatccacaaggattcattatgatccagactaagcctcatgcacctaatttcttccgcttttccatttttactgtgaaaattggtcctaagtcctgtagtatacatactctagacttatttacagctgggcataacaacggtggctcatggcactcaaagtttccagtaacactcctgcactcacagtctggtatagaccatgagatttttttagatgtgttttaaatgaacagagaaaggcaatgaggcacaggaaagagagccgtggtctcttgtttggagatgtgggttttgctactggttggaaagtgaggtgtggcatggcgcatgagggtggggagaggtgggtgatgctcaggtcatgtagggcatagtaggtcttacttactaaggaactctttttttctgagaataacaggaatgtcttgattgatttgaagtgggaggatgacacaatcagatttttaaaagattatttaaatcgctaataaatcaaatgatgggttcagcgaatgtttgcagaggatacttactgtgtgacaggcatagtgctggccttacctggggtatctgtgtattcttgtaggaatcctacataaaagctgttaaaatattttaacagaaaaaagcttttcttgacatctttgaattatgacaaccaattccaaacttctggttgcaaatgggaggtgtatcttaaagcaatggcgattgcattttcaatttctgttcattaaaatgatattttccctggctttgttacatgacccttgattctgtgataatttgcatatctagagtcgatgaatcaatacatgcaaaactgtggtgcgctcgctcatattctgttatacttcagacgccttttggaagcatgtggctctcagttcagcataatgctcctgataaaattgccccctccatacccgctgtcactttgttcctggtgtgtccagaggtattgtaacattggggtatttctcctttgactctaatgggaccccctgctagttgtgttcttgtggcctcagcttggaaggcctcccaaaagcctgaattaatgaaagcttctgatgtgccgatccctttctctggcagggtgagaacgcagtttctataggagcgtgaatgcctgctgctcaggcaataatctctgcattcagcctcagtactaaagacaggcagagcagacagccacagggggtgggatttgaggagccctataaagtccctctccacagctgacacacaccactccttcccatgactatcaggatgcctacaatcttaacagttactttattcattggctgttgtcactcatccatctggttattccataaacacttagcgagtgagtgcctgcagaaatggggctaggcattggacacagaaagatgaaaaagacctgaggcgtgtacccagagaagtcacagcctagccactgagacaggtgcatcatcaagtaattatgatataccatgataaatgcatatcatttatatggtatatcatataccatatgatatggtatatcatataccatatgatatggtatatcatataccatatgatatggtatatgagagagatatggattaaaacatcagctccagaacacatcttgttaacatgcgaatgtagttcctcagggtaacaaactaatttccaattacccgtgggtacagccaaattaatagttcctatgagagaactggaccaagagagaacagaactagggactgatatgtattgataggctggtgtcaagtgggaaggggggaagtcaggtgctgtgtagggagcagactgagagctctggagggcaggagtgccaggaaggtcactgaaagcaacttttcatttgtgcaaatgttgtcagaggttgctctgctcatgttaaactcactttataaagtggaaggaacttttaagatatccaagtccattgaggcttcttagggcaatactgaatctagattggtgaagtgacttgtgcttgcccagacagcaaaaagaggacaaagcatatctatgaacccgtaatgctaaccttcattattcaacagtgatgcttatggcaatgccaacgggtgttggggccttttattaatttttaattttagttttttatgtttttgagacaagatcttgatttgtcgcccgagctggagtgcagcggtgcaatcacagctcactgcagcctcgatctcctgggctcaatcaatcctcccacctcagcctcctgagtagctgggactataggcatgtgcccccagacttggcaaatttatgcattttttgtagagacgggattttgccatgttgcccaggctggtctcgaactcctgagctcaagcaatccgcctacctcggcttcccaaagtgctggaattaccggtgtgagccaccgtgccctgcctgcttgagcctttttgctattctccctcctatgggaaaaagaatcgagaaagagcagtaggctctactagagtctggagcatatcggttctgagatttcagattaaattctctatgtctgcagcaagtacaaatgtgagtgtatattcagcctcttgaagaagacatctatccatttcttcagtgaatatttgcccggagtcttcttcgtgacaggcactgttgtaggccctggaggtacagcaataaacaagacgaagtctctgccctcctgaaactaaccgtttagccaaggcttagcatctctcacactcaggtcaacttctgcattttagaaatctgtttcaggcacacatttgacaagtaaagaggttccaaaaatacattaataaggatgaaaatgaggccattctgatattccattgcttggcaaaaatgcttaatatgggaatttaatatggaatgggtgctgatgctgtcaaaggtggtgacattctgttagaaaattcagtgatttcaaagaaggcctcagagctgcctagtttgtaattagatattttgaagaatctgtgttaattaggactctgtggcttgtgcatgtatactgggacgagactggagtttgtgtctctcccatgatgatggcatgtaaattaatctccaaggaattgcaagatgctgaaatgtgaggtacttgagtacacgttgcatgagtgcacacaagtgtgcctgtgccgggatgcgtgtgcacgcgtgcacacacatacactctagcagatagtaactttttgctacacgtgatttccaaagtgtctaaatttacatgtcttttgagtaggaggaaattaggacttttgtctgttatatgccttgcagtctcttggccttctctgggctgctggggcagaatgaggccaacagagaaccacggatgccagtctgggtcacaagggcttaaggaagcagcagatggttggactgactggggtgtccattaagaatccaggggtagtgagagtcttacctggagtttgaggccgcacttccattgccaggactctcagctgagtggctggaagagacctgtaggagccatccttccagtatctatcagaggtttctgcactgttttaagctcgtcctagtgatcgagggaaccttgactgggggtgctgatgattattaacagtggccatactcccacggctgcaggtggagatgaagtgtttgatgagaagatgagcaagagctcaggtgtgccccaccagctctgccactcccaagctgccgaacttaggcactaacttacctctctgtgtctgcttcccaacttgagaaccggaaatgataaaagtacctgctccctagggagtaggtatggttaaatgagacctcttaaatgagaccatgcacacgaagagcagagcacagtgcctggcacacaggaggcacctaataaacatcaatgatgctgctgctggtaacacccatttgctgagggtcttcagtggctcaggcacagtactcagtgcttaacatataatatgtaatttattcttcacagtagcctgagtcacttgcttgttcttctggttaatatcctaatgtttagctcaccgacttagatgctcatgacttccaaaggatcttcatgtaacaaggactccatatctatttttaaaaaataagagctttattaagatataatttacataccataaaattacctatttaaaatgtacaattcagtggtttttagtatattcacagagttgtgcaatcatcatcactatctaattgtagaaaattttcatgactccaaaaagaaactccatatccattagcagtcactccccattttatctctcccagtccctggcaagcatgaatttactttctgtctctatggagttgcctattttgggcatttcatgtaaatggcatcatacaacaggtagatatttgtgtgtgtgtgtgtgtgtgtgtgtgtgtgatcagcttctttcacgtaacataatgctttcaaggttcactcatgtggcatccatacctattttgaatgaagaatgaagacagtcatctgagacagttgtattagtccatttggaagatgaggaaactgaggctgagagtgtgtatgtaatttgctcatggccacccatcttgaaagcgcttgagctgggatttgtgctcaggtccatcttggctccaaggcaagaccttggccttctcatccactcactggtctctggttggacctctgcatcatgctgaacaccatttctatagagatgggtgtgtcccactgggtgtggacatcctgaggaattgctgtggttgcaagaactctgatattttccatctaccttgagggggatatggtttcatgtctgtatactcacatagtgttgaccagtctaattcttttgtccatttcctaagggttatgatatgaacttggaaagttacagaaatgaaagtgataggagagatatactttctgggttggaaacccagcaaccagtcactcaatatgatggaggaaatgtcatccttcttgtgttgtcttcaataatagattgtaatgaaacactatggtgtcttagttggctcccctcctaccccatgccccctcccccagccccagtgcttttctggagacatgagatggtgtatcccttcctcagttgctgtgatagcagtggggatgatggggacaggtattcatggaaggaaaaggcgtggtaccagcaggctcttgggcagggatgtgtgtcttcacttgatcatcagggaatgagctatcatgatgacagagcacatcctatgaagtacaaatcttcccccacatttccccaaaattacttttgtcctgctctgttctctcacatgctattctagggaaaaggtcccattttatcattaaaatgcaaatgagatttccatcttgcttctaccaaagaaggaggaaaataacctatataaacaccatgaaaccttactttgacttaaaactagtggaaattggcccctgaatcagataattagctgaaagtacatgaacaatttaggcctccggtagtggttatgtgcttgttgtataggaatttcgtctaccatggatttcatggaagtggccccattcctgctctgggtttatgtaagactttcagcagcagcccagtctgatgtagcagatgttccagtgcctgtccctatcctcctgctcgcaccacttcagctcatgctggctcacttctgactgccaacttggcattttttttgcctttttcttgactgagcctactttgctgctcccatggaaggcaggaagtgttggggaattagtggaccccaggaggagccctcaaccaataactgatggaagatggtgcgtaaacaccccaattccctcagccttgggtagggtaactcaggaatatggtttacatggggtcccagtttcctctgtaggaaaaattccactgggcgacagcagtagctagttagaaacttcaccttttattggttttcttggctgccttcccagccctttctcttttctctaattccctactggcgatttcttcacttcccaaacaaaccacttgtgctcaaattgtaattgtaggatcagcttctggggaaacccaaatgaagacatatggtaaagcttccctcttttcttgcctttctgccttttgccccaatcagttagctttgatggtgggagtgaggggatgctcaacctctcaggcaggctaatggctctcaggagacacaatccacagctgattggcagttttctccccaagatatcttcagaacaaaccctggtgctggtgagtgatccatgcagcatgaaaagagagggtgaagcttgatgaggcatgttccagtctcatcaaactattttgtttccataattttccttctcagaaaagggcagaatcaagtacagttgattctcatcatttatggtaattcttgtgttttataaagttgctgtaaatcctgaattagcaaatagtgaaccgttgcttttaggggaaatatacggttaggttcctgtgagcctctagtcacaacattttcttcttcttcttcttcttttttttttcgagcttagggtcttgttctatcacccaggtgggagtgcagtggcgcgatcttggctcactgcaacctccacatcccaggttcaagcgattctcccacttcagcctaccgagtagctgggactacaggcatgcaccaccatatccggctaacttttgtattttttggtagaggtggggtttcaccacattggccaggcttgtctcaaactcctgacgtcaggtgatctgcctgcctcggcctcccaaagtgctaggattataggcatgagccatcacacctggtcaggtcacattttcatcaactaaatacataaccttgttgtatgtgtgtttctgtttaaagacatcttatttcatatatactgttgatttgttagcattgaactcacagccacagcactgtgactcatttctgaacaaagttatctaacacacatattttctccataaggcacctcgcatcttgcacttaggaacactggatagcacttcagcattgcacttgggggtgattttaaacagtgcaaacactaacaaaaaagcacaaaatgtgaaaaacatggcactaaatagatcacagaatggacactagcttacagcatgagcgctcgaacaagaaggcagagcgctgccttgttcaacctcagctgaggacatgtgcatcgggtgactcaaacttttttcactgctgtgtgcatgactgcgaatgactgcagaacaccatgaatattgatttgatttcggggttacaaataaattttaacacgtagaagaatttgcaaatatatattcagtgaataatgagggtcagttgtctttcttacttcattacaataagactctacttcaattcagtatttttatttcattttattttgtttttgagagatagggtcttgctctgtcacccaggctggagtgcagtggtgtgatcctagctcactgcagcctcaaactcctgggctcaagtgatcctcccgccccagcctcccaaatagctaggactacaggaacatgccaccacacctggctaatttatttatttttttgtggagacggcctccctatgttgcccaggctggtctccaactcctgttttcaagccatcccccttctcactctcccaaagtacaatttagtatatttattaaacgtgtgttccaggctttttgattgctattgagatgctaatgagatggtccctgtcattaaagagcgtccattctggtggcacaaggaactcaaattatgacacaagacagaatacctactccagaagagagttctgtgaaagcgtgaaggagggacttgagtgtgcgattcaggaaggacttcacattggagggagtttttttagataggtcttgagaaacattttacattttgaacacctcatacatcattgataaaaaaaagaagcaattggtcgaaacaacttcatttccccagatcaagtcttctaggttacctgcatctgcacccaccagtcccaccttgattcctctctagatgaagggcgtcttttcctacctaaggccgtcccttctgcttatgctggggactcctttgctctttggggcatcctctcttctcctggggaattgatctctccctctctacttgaatattcctactagcgtatacatgggcttccgtgtcatcccccttgatcccgcattgccgccagccacccctcattcctttaggcctttcacagcaaaattgctggaaagggtggtctgaagtcaccatcactacttcctcccctcacattctttccaagccaccaccactttatgggggctgctcctttggaggccacttatggacattgcatcacctttctgtccttttatcttaagtaccagttaggatgctttcagctgcctgttgcagaatgtcctgatacaagtgacttacacaatacggacattgactgttaagagagttacgttctcactgaacaaggatgttccaggcttggcttgggtgtttcataacaccttcaaggacccagacttcagtttcctgccctgcctctcttgatcacatcagcagatattatgtcgtctaaaagcagggaagggagtgaagtagcctctgtgtttttctttttatcatggaggatgttttttttgccctgcaagccccatgcacatttcttaaatatcaccccctaaactcatccctggcaaagggggatggtattatccttattggcttggaccaattaagattcatcccctgagtctgtgaatgggacgcatcttctttgaaatgttgtcatttaaccaaaattggatctgttaaaggaagggggagcgcctaaggtgaaagtgccaggcagtgtctgccacattttccctgacccttcctagcaattttgacagccagccaccccatccttcttgaagcacttcatttccatcacatgctttgtgacatcatttcctctgggttttatttatttatttatttttttatttatttgagacaaaatctctctctgttgcccaggctggagtgcagtggcacgatctcaattcactgcaacctctgcctcccgggttcaagcgattttcctgcctcagcctcccaagtagctgggataacaggcatgtgccaccacacctagctaatttttgtatttttagtagagacagggtttcaccatgttggccagactggtcttgaactcctgacctcaggtgatccacccgcctcggcctcccaaagtgctgggattacaggcataagccaccgcgcctggccgctctgggttttcttttaacttttctggccactcctgtttcctgttgactcctttctcattgctctacctctaattggtggaatgcccaaatagttagacctgaggtccttcttgtcaggatctgtaggttctcctgagtgatctcagcagtccctctgtatcatctatatgccgagtatatcctaaacttgcttctctcaagagtttgtcatctcattgaatgagtttcccatctcattgatgggcaccgccatctatctgtatagttgcttaaagtacgggcatgttgcatgagtcctctgtttcccacccctgccattttgttctccactcaccagcaagtcctgcctgatacgatatctagaacacatccagaatctgtttgtttctctccatttctgctcctgccaccctcattccacgcatcttcctgtgtggagagctgacagcctttttatcggcctcctttcttctacccttgctcccaataattgatcctccgtggaacagccacaatgatcttttaaaaatatgaatctgatttctcttgacccgcagcttaaaattctctatcggttcctctttccactcggcataaaatctgctttctggtgctggcctgcagcaccctgagtgctggctgtgctgacctcctttccaaggctggtcttgagccgtcttcctctaacctatgctgcacttctttctgctttccttgaataaaacaagctcctcctgatctgagggcctttacgggacctcttttttttttttctcctaggattatcttctgcccaattttcataggactggcttctcctcgcctctgaaatctcagtccaaatgtcatgtcctccaagaatctttctctaaccgcccactcctgctgggcaccctctgttgtagcatactgttaggagtctctgcatcatgcctctaactctttgaaaaaaagttctatttgttagtttaataaactaaaactaaaaaatttataaaccaaatttcaaaattttaaaaattaataaactaaaaacagtacaatgatatctctgtgaagtcaagggaggagagagttttaagaaggggaacttaattagcagcactaaaggctctacaacgactcaagataatgataatgatgatgatgatgatggtgataatgacagtgataactaacatttattgttactatgaacctggaagagtgccaggcattttgcgtacattatcatatttaattctgacagattaaaagtcctgacaatgcctctactgtcaaggaatgttattctcattctcagaacactgagacttagggaggtcagtcaaagtgcctggcacatggtagctttcgattaatgtttgctatgtgagtaaataaatttccacaaggtcctggagctggtgaatggtagagttgagagtctaacttagatctgactgaatccaaagtccgtatttgtaaccactggtctatatttgctcagatgaagacagagaaccccttaacagattgagaaaaggaagcctaatataggataaatgatttcttatttatttaaaacatatgataaataaaactaattttcagtccaaaaccttctgaattttggaattctggactccattcattcaattcatttgaaggcataggtgagttctttaaaagaagcattaggaatgaatccagattgaacaattttcttattaaaataccctaaagatgcattcttatgatgagccaggttcattgtccaggaaagctattaaaactcagtctttgtgatgagtgcagtaagaaccccacttgaattacgtagtgagcaggtgcttcctaaaccaagtttcatgtttgacaagctaggagagaacccagtgttaaatgttttctggcatgttggcctttggtttctcatattatgggacatatgtttagtgcttgtggtatatgcttagcctactcttgtaggatgactgagacctcacacaacatcaaggacatagtctttgcctttgctgagttcagagtgtaattggagtgatgaaacatacatgtgaataaatgcaaagtcacaagtaaagacagttaatgtgattgatgaaggacgtgtggcacaagatggataagaatgagaagtagaagaagtaggtggttttgaactttcgttactcagggaagggaatgtatgtggattggtggagaagagaggggaggaagatggttttaagcactggtaagatggtgcatatttgcaagttttgctcaagggatagaaagggctgagacccagtggggaggaatcagaggggaatcggcaaagagaattagggaaatgagaactgtcagtagaggaagtgagattaggctggccgggagctatttggggtttctgagtactgatgttacatgaaggaatatttgtgagggataaatattgcagtgggtgcatttgagagcaaaaccagattcaggcccagttagggaagggtttcttaaacgtcggcctttcctatgccatcttcactttttaattttttggtggccatatttagatatcagctgtgtcactatatacttaatattttctgtaagttgatttcacttttaaaaacttaaatttagctttgccctatgcaataaacttatcattgtttactgaatgcttttctttaaatttaaccccttaaatcttaaataaatgtagccttaccccaagcactagtacctatgaaatcataggtattctgtgctagttctatttttccaaatgcacagtaaattaaacctgcggccattaaaaaaatgttgcatatgtgtgttacctaatgctgtcttgtgtacctatggttcatgtgctacacttttgggaatacccaaggcactgttacagctttctaactgtgacatgatgaaactgaataaataggagccagatacatttattagatacttactgtgtgcaagcccttgtgatggaggagatgaacatatgatgcagtccttactcttaatagatttggagcaaagcagagagagaatggcacaccaatgagaaagtgagatgtaggcctgacaggtccaatctctgccatgtaaagcagcttttagataagccatctgatatcagctctgccactggtcagctgagtgagctgccactctggaacccaagggtaagctctcctcaaattcagttcacttcaacaagtatttgccagatactatatgacacttttgcagatattaaggaaattaaagtgtcttagggagtgttaaaccagaaaccaaagtatgaagtgggagacagagtggaataaggactgtaagagagatgcaatgacatgtattcggtacttacgggaggaagagtttatagccagctttggggaccagggaaggcttcctagaagatgtgtcatttcagatgaactttaaaagatgggatcatacaaaaggcagtgatggagggtgttcagcagagggaagggcatcatcatgacaacagagagggaaactgaggcacctgtgaggagaagagcaagtctccgttgtttggtggtgatgttgggggcatgaaggtggaaaggaaggttggggtcttatggataccttacatgctaggttgaacatggatttattttcacagatgatcaggagccatggaaggctacactagctgggcgtacataatttaagtcagagggacaaataactgcaagctaaatactcttagggagaaactgcagcaatctgggtgagaaacaatgaatttgtgagtagtcaccatagcaaaggtctgggctaggggggcactggaggagtgaaaaagaaaggtttaaatagtcactgagagggctgaggacccactagccactggcatagtggagtcaatcatttctccgaaattacgaggaggagaggtggggcatctctaaggcgtggagcagtggaggatggtgattgtatggtaggggaaagaagataatgatcgcagttccagtaggtgatggatgaggaggggaaggcgttttacagattattcactgggaaagaacagaggcagtccacactgtagttaattccttttatttttgtctttaagtatactcaaggataaatagccatacaatttctgtttggcttttcatgctggagaggtgcagaggttgcactgaacgtggacgatattaattttgacttgtacaagggtactgtgtcctgggaactggccaataatattctatgaaaagtcatttgagtaactcatttttatacataaaataggtagttccttttcaatttccttatattttgggatacttacatgccaggattcctctatttcaatctcttgttttctacctgaaaagatcttacggttggtggctgtggatgcaattctgcctttacacagaaatgactctcctgggcatacctttaggcaaagagcagatgaacgcataacgagcagctttgagatttggtattcccactgcagaacgaagagaagggtggcccactggaaatttcctcagagaaacgtctaagtctgcatctcccacatccattcattttcatgcatagttctttcatctgttgttttttaatttatctattttatataatgtctatctctgtagtacctgggatgaaatgcgccaatcctgactgcaatgaatagggcaaagcaattcttgggagctgctctgggcaggaagtggaggctgaattcttttaaaggaaaattttttggggatcgtgactcactggccttcatccccatcatcactgggattggttaagtgccaggaaacagctggaagtcgacagacaatttagggtacaaatgaaaggagaagttactgttaaagggatctgtattctctgttatcaaaaccaccaacgctgtctcctagctaataggaaccaaaactgtgccctgagaatgctgccagatgtttctcaataggcacgttacgttttatggtcctggatgctgcacttaaaaatagtgtccaatttcaaactcactattaagtagacactaaacttttggaatctattaatggatctagatctccaacctagtggcaacaaatgtttgaagtgaagtttattgttttaagtgaattttaaatgtgaaatgatgagtatttaacttcaatttttttgcatgatttttccactgtggcaactttccttttaaaatgatagaacctcattataatgtggctgataggaaatctgtttattcatgcatatatttattcatttacaaatatttatttactacctaccaggctctgtgcagtactccgataaactggaacaagagccatattttgtactttgtatgtttctccaagagaaatgttctattgtactacattaattcttagatgcatttttgaattatttacccttctgaaatcagaatgtgtcttactagcaatatgtcataatttaattggcaatttaaattttcaagaggcacataagataatgatgtgttttgtaattgacaatgtcttgatttgatagaagatatttgtacaatactatattggtaccatgctttggccgatgtaatggtcctatttggagttcactactaatgttaagcctctagttttaggcgttgatgttggtccagggacactaggactcaaatgcccagatgtccaggtctaagagagaagaatcagaaggtgaatgcagagcccagtgggttcaagccatgtagacaataatagcagaatggagagacattttccgatgcctcatgtctatgcatcttctctccctttctggcctgccacataaattcattgcagtgcaactctgccagatatcagaatagagcaggaggaaagagaaacagctgcagcatgggagataggactcataccaagagagattaggctcggtgtgtatacctaatgatggtaaagtgaacaaccaggttacagtgatagcagcaacacgcatttatcgagtgtcctatccacttcagaaacactatttttaaatgataacaattctacaagataagtattcattgatcatcaatattatccttgtttcatgtgtaaaactggggctcagagagggtaaaaaacttgtccaaggtcatacagttaggaaatggtagaaccaggattcaggctttgctccatggggcatcaaggtctgctccacttccagtgtgccatgcagtttccccaaatctgagaacatgcatttactttatgtccggttatgtgaggtctcagaagccagacagggccagagtatgaagagttacataaaagagcttcagaatctaatagggttcctgagcaagattctaccaatacctggaataacttcctctgtgtatagcccaggtgcatggactagaccagattgggaggggatggttgcccagcaggcccagagaaggagctggtagcatggtgagttaagggctgaggatcaagaatttgttagtttaattagaccccccaaagagcagaagtgctgttgtagttaagactctggaactcagtgataggatattttaataaagcccatgatctcaagaggaacttgctgaatggatgagctcacagtccatagttgggagctaatgaacaactttaattatgtttctgatactagtggaggtgttctcctgtcaatgaattccttttagattttgaccccatgtagatctcaaggaaataaataaataaataaattagttaattaatttatttattttgagatggagtctagctctgtcactcatgctggagtacaatggcacgatcccggcccactgcaacctctgcctccctggttcaagcaattctcctgcctcagcctcccgagtagctgggactacaggtgcccgccaccacgcctggctagtttttgtatttttagtagagatggggtttcaccatgttggccaggctggtctcaaactcctgacctcaggtgatctgcctgcctcggcctcccaaaatgctgggattataggtgagccaccatctcaaggaaatttaaaatgtttgggtttgctactgaagagccaagaagaattttgcaaattatgagaaagagcccaagctttcaaatgtccaaggtggctattcatatctgggaactaggaagaattccaagttgttcacctatgcctgtttctaatgccttcccacaagggtgacagagcaaagttgatttctattaatttaggggaaataatctccactgaatggccagaacaataacctttctaatgacacacagaacaacgctactgtcacccttgtcacggctgtacttgtcatcataggtatttattaggtacttaaatacttgtttggctcaagatagctcacaaagagggtcataaagtctcgttttctgtcttttagagtttccagtataagaacaaatagatgagcaaacacatataagaaatacattgaagagaattagaatattcatgaatgtacagtgagaaattcttaacctatacagggtcatagttgacttcatttaaatattttctaagggtagaacgcaacattattagaatacctgagaggggaaggttgggaccgtgcccttgaagtagcatattaaatttaagagaggaaagagaaagctggcaatatttcaagtctggaactgatccttaaggcaatactttgctgctggaatttgtattttaaagaccagccagaatctcttgtggtcctttgcccatgtagccctatgaggacgtttgtatatttggattgcttgaggcctgagtgtcatgggcataggcagagtcattggatcaacccatgtatctgttgcttgacacattgctctggatacattgtacccaagaaatcagcccaagtgggatccagcccaaaagagaattgttgattttcaaaactgaacagtccaggcaaagctcaatctagggctcagatcatgcatccaggactgcatagttcttcatttcttgattcgtcttctttgcattgctctattcttaggcaagttccatcttggaaatcctaaggtggctgccaaaggctgcagaccctcctctgtcttccagatttacatccttcaggagagcgaaagctcagttccctaaggctgaaacaaaagtcttgcaatggcatctttttggtcctgattggcctgtctagggtcagatactcattctttaattatcatggtggtgattgggggaatcgaatgtgctaattggctttgcctgggttgtgtgcttcactcatggaacctaagagagaagcccagtgaagcccaactcaagggctgagagtgggctgtagtggtttccctaaacaaaatcggtactgttgacataatatggcatggtcatggatgctgagagaatgatgtagagaaagggtggatgagaatggaagcaggactaggcacagtggttcacacttgtaacttcagctacttgggaggctgaggcaggaggatcgcttgtggccaggagttagtgaccagcctgagcaacatagtgagaccctatctctaaaaaaatttatttttaaattagccaagtgtggtggtgcatgcctatagtcccagctgcttgggagactgaggtaggaggatcgcttcagcccaggagttcaaagttacggtgagctatgattgcaccactgcacactagcctgggtaaacagagcaagactctgtccataaaaaagaagaaggaggaggagaaggaggctaagaagaaaggaagtgggtatgctagtttggaggtattgaagtccaggcaaagaatcatggtggcttggacaagcagagtgactgctgagatggagagtggtggatgggtttgatttctagtttggagatggaatccacagcatttgctgatgaaatacatgttgaagatggtaaggaaaataattaaaaatgattcctaggcttgtggactgagtaacttgggaggatggtggtagcatttcttgagataggtaagaatggagggtttttattattttaaaatcaactatgctattctagctctgtgggatttgagaagcctgttaatatctgagtgggaatgtcaattggacagttggagacaggagtctggaatttagagggtagagctggaaatatatattcatggatatatgaatccataatgagaaggggtggctatagcagtttttatttttacttttaaagccatttaactagtttattaaattggcgggccttcttgagagtacaaaccataaatcacttcatttatcttcaactcctaccttcactcttgccctgtgaggccaaccctggatgatacaccagaaatacctcacagcttttccaggcactttaaaaatcaaatcaagtaaaatagaaataaaaattgtacttttttttcagatattcaaaagtccagttttacatgaatcaaaacatcaacctctcatccaattcaaagctctctttcagccgggtgaggtggcttgttcctgtaatcccagcacttatgggaggccgaggcaggccatcgcttgagcccaggagcttgagaccagcctggtgaaaccctgtctctactgaaaatacaaaaactagctgggcgtggtggtgtgtgcctgtagtcccagctactcgggaggctgaggcacaagagtcacttgaacaagtggggagggctttgcagtgagcagagatcgtgccactgcaccccagcctgggtgacagagccagtccctgtccaaaacaaaaccaaacaagaaaacctgtaatcccagcactctgggaggccgaggtgggtacatcacctcaggtcggcagttcaagacctgcctggccaaaatggtaaaaccccgtctctactgaaaatacaaaaaattggctgggcattgtggcgggtgcctataatcccagatactcaggatgctgaggcaggagaatcgcttgaacccgggaggcagagtttatattgagccgagatcgcgccattgcactccagcctgggtgacagagggagactccatctcaaacaacaacagcaacaacaacaaaacaaaatcacaaagctctcctttccctgtaggccaggcctggcctgagacactgcagatcagccatgggaaagggaaggcgggggccgtggctgttccttttccctccttgtgcacactcctttcctgctggctttgctgcttttggctccaccacagtcaaggggcagggagaaggtgactagaaagcaagggtgttttacttagctggtgcttcttatggttctttctagtcatgaaatagtctctgtcttgcaggtgtccagcttttgtgagttcttggccaccctgtgaagacccccagactttcctctacagacatggatgatgccctccctggctggtctcttatgacacccccggcctctcagcttctgccttgagtgtaccctgaactttttttctcaagtggatggacttcttggggaaggcttttttctgaaggctttgatgtagcttctgaccccatccagtgcctacttggcccaggagaaaccattaggcatctttgtgctgccatatatggggaaagcacgtgactccactgttgcctaccctcctcagcctgcattacaggccaaacactgcgcacccatgtctgattttcccagggccgtctcattgcacacctccagagggcatcattcacatgtgttctcctagaattgcacagttaatgtggcagccctgagttcagacaaatctctcatgcccctacctgtagcagtgcattctatgaagtatgcagttcagcaggcacccagctggggttccagatgctgagacccccttctgccaacccctctgatctctgagcagttctctttctgctccttcatttgccatagtgctgcaatgctatgtgttcttttctgctaagaaatgctttttctccagcgaattctcttatatggcttagagatcatatgcaagctctgcattgatggatcctcagtcttcagttttgagagatctcagtataaaccccaagacaacaggaaagggctcacttaacattgccttgtaacagagaaaccctctctttgaatgaaagctgtcagggaagctcagtatataaagcaggtgacatggtgctccattggggtggtggggaacgaggggcggggtgctcaaggctggcttctgtgcacagttagaaaactcctgtgcctgagaaagccaaccgtggtttccacgaccaggagtttcccactatttacagttctgcagtgtttggcttcttcatgattttctgctggtgaaagcaatagtttgtacaagacgtgtgggaataaaaatagtccaggtgctgcccttttccgcggcagagggaccacctgtcaggctgccctagtgggcctcttcccacagcacggttctgccacttgaatacctccctgcctgtttcctgacgctgacctagaagcttctggtgaatgctttgcttctgcacaacttgcatggtgggtgccttttttttgtgaatgaaaaggtcttcctctggctctgaatatagcaactgcatgacctgcagaaataattttgttgtttccttgtggccatgttagcttagggctttgtaccttatagggacattggcaagaattttctcaaaaggttttcatctgtaaattttcatctttgcacatagtagagagcttagaacgtcagtctcgttccatctgttataagttttgaggctttgggcaaagtacctaacttccctgtgcctcgatttctccatctgtaacactggagcaagagtagaacctccatcctggtctgcggtgaggcttagtgagggcattcatgtgaaatgtacacagtgcctggcacagagcaagcacccagaacatgttactaattgcattagtttcctcttgctgctataacaagttgcacaaactgcatagcttaaaacaacacaagtttatcatatcattctgcatgttagacttcctaagtgggtcatatggggctaaaatcaaggtgtccacagggctgtttccttctgggggctttagggagaatccttcccttgccttttccagcttctaaaggctgctcatgtttcttggctcatggctgcaccactgtaacctttgcatctgtcctcacatgcctcctctctctggccctcccgctcccccttgtgattacactggacccacccagataatccaggatcatctcctgatctcaagatcttaatcacatcagcaaaatccctttgtcgtgtaaagtagtaaagtaatgtgctcacaggttccagggatcaggacatggacatctttgggggaccgaacattatcctgctgatcctaccaattatttaaaaagttgtcctgtaagtatctacagtgtgcctctgctgtgtgctgggcatacaaggtgaataagacacaatgcttatgccaaaatagatacacaagcacgatgcccttagtaataatcacagtagctgacatttactgagtatttactatgtgccaggcattgtgccaggcacttcaagtgaattatcttgctgaaatctcaccatggcactaagggaaaggtataatttccattttaaggataagaacactgaggcttagagagcttaagtattttttctcaaggccacagagctaaggacatgagctcaggtctatctgattctaagcttgaacaattcatcacagcccccttaaaagatgggtgggtttaccctcaggctctcttcttcactgtgtgtgtagctaaagattggccagcttaagaggagcagatcacacaagcagctatgatgagggccagtgggcagagctcccagaggaggctgatgcaacattgctcccattcctgccatcacccaaagctgcaagtccatggccctggcacttgggcaaatgttgccttgtcttcaagtgaatctaaaaaactgtgtaagggcatgattaattccaccaaactggattctccccaagatcacttacaccacactaatggggccctgcttcagcctgaggaactgtgtgaataaaagagaagaagcccagtgagattcttctttcatgattaatagaaaaaccacctggtgactttaaaaggcaaagaaggaggtacattcagatgagtcagaaagaaaaggcagcatttgaatcctaaaggccatgttactcttgatcttctccaggatttcctttagggaaatggaaatttttacatggagggcagaggtggggtgaaggttggactgtagactgagtggtgttataatgagaccaacccgggtgctgggttgaatcatatattctagatgggaagtttatattctaatgagggagacacacagggaatgagcaaatcagtacagaatacaatctcagctagcactaagttgctttgaggaaaatcaagccaggtggtgggctaggaagagactggaggggagaatggcccttctgcagtggggtggtgaggaaggaagtcctcgctgaggaggcagcattgagcactgagagggagctaccctgtaaggccctgggcaagactgttccaggttgagggaacaacacacgtgcagtccctgagactagagctaacttggacaaatgagaagaccagtgtggctgggcggtattgagggacagatggtaggagatgaaggtggagaagtgggccatggccagaatttggggatctaaggacaggagtttggaggttcctcagggagttgtgggaaccctctggaaggttttcagcatgcagtggagggatcgaatttacattttggcaggcaggttaggacactgttgtgcagaaacaacaatggctaatgggctggttgaggtgggaatgaaagaagtggtggaatgaaatcaggatgtatttggaagggagagttggctggactggctgtgggtgtcagggcagggtggagccatagactactctggattttctgtccaagccctggatgaatagcagtaccatgaattgagatgcacaagcctaggagaagaggcagagttgggatgtgaatgtgtatgagtgaaaacaaaatttctctttgaatcatgttcaatgtgctacttggacaagcagctaattggacaactaagtgtaaaaattaaatagtgaacaatgagtggaacaaaacgttagagctgtacattttgctttagaaggggcatactttttgctttagaacgtgtggcaatctaatacaaatggccaacaaacatatgaaaaaatgctcaacatcactaatgataagggagatgcaaatcaaaaccacaaagcgatactgccttacccctgcaagaatggccataataaaaaaatcaaaaaataatagatgttggcggggatgtggtgaaaagggaacacttctacactgctgctgggaatacaaccactatggaaaacagtgtggagattccttaaagaactaaaagtagaaccaccatttgatccaacaatcccactcctgggtgcatacctagaggaaaagaagtcattatacgaaaaagatactcatacatgcatgtttctagcaacacaattcacaattgcaaaaatatggaaccagcccaaatgcccatcaatcaatgagtggatgaagaaattgtgatacacacacacacacacacacacacacacacacacacacacacacacacaccatggaatactattcagccataaaaaggaatgaaatgatggcatctgcagcaacctggatggaattggagaccaacattctaagtgaagtaactcaggaatggaaaaaccaaacattgtgtgttcttacttataagtgggagctaagctatgaggatgcaaaggcatcctcattggactttggggacttggtgaaaagggtgggggcagtgagggataaaagacagcaaattgggtacagtgtacactgctcgggtgatgggtgcaccaaaatttcacaagtcaccactaaagagcttagtcatgtaaccaaacaccacctcttccccaaaaacctacagaaataataataaaaaagaacttgtggcaatctaattgatgataattgatggtagcatccatgttggggaaggaaggaaacaatgccaaacactatgctagctgcttcacatgtattgtttttcacagggtgtaaggcttgagaagcatctagtgtcctgtgtcagattatgcattctggaggcagattgctaaggttcaagtcctggccctgcctgttagtggcatgttctatgctttgcttgcttatctgtaaaatggagtaataataataccttgcttgtaaagttatttttacatttaaatgagttaatgcatgtaaagcacttggaatagtgcctggtattgtaatgaacaataaatgagcaattttaatgttactattttattttctccgtagggtgcacctcaatagatggaagagtagggcatgtgataaggtttggctgtgttctcatccaaatctcattttgaattgtagctcccataattttcacatgttgtgggtgggaccaggtgggaagtaactgaatcatgggggcggttcccccatactgttctcgtggtagtgaataagtctcatgaaatctaatggttttataaggggttttccctttcacttgattctcattctctcttgcctgctgccaagaaagacgtgcctttcaccttctgccataattgtgaggacttcccagccacatggaactgtgagtccattaagcctctttttctttataaattaattacccagtctcaggtatgtctttatcagcagtgtcaaaacagactaatacaatgtgttataacaagagtgttacttcagaatcttgttttaacttgtgtattagtcagtgtgcaggatgcttgggttctgtcctggtttttgccatgtttccattttatgagcagttcctctatcacaatatagatgaatgcctctatcacaatatagatgcagcaataagttgggattgctgcatagccatcccaacttattggcataaaacaagcattttattatgctcagataatgtgcttcagggattcatgcaggacacagaggcgatggtttgtctctattctgcaacgtctggggcctcacctgggaagatgagcctcacctgggaaatctacaggtgtctgtggggttaggggagggggctgaaatcaactggaggtatcttggctcatgtgactggtggttgattctggctcttggctgagatctcagcgtggctgttggctggaacatctgtatgtgatcactgtgtttctccacatgggttagcttgagcttcctcacagtgtggcagctggatcctaagagtgagcatcccaaaagaaccaggcagaagcggtgtggtctttcattatttagctttggaggtcacatagtgtcacttctgctttagtcacaagcctgtccagattcaaggagagggaacataggttcgatgttctcacggggggaatattaaagtcacatagtaaggagtatatgggataggagagattgttgtagctagttttggtaaatacagtcttccaggaggcttaacctgtgggccacttatgagcctgtctggcttaaaggatccagtacacatctaaatttggacatactctaaaatcaggatctcttttatttattaaagaacctgagtaatcttaacctaagttgtattaaaattcaaagattgactccttagaacagctaagctttcgttcatttaatgggcactgattgaatcttgactctgtgcaagatcctgtgctaatggctgtgggagcatattgagatgccacaagaagttggcatgctaaaaggtgaagacaaatacagatggctttcaattaactagtctctggagagacagaggccactcacaacctctaatgatagttaaaataaaacttattcaggccaggcacagtggctcaggcctataatcccagcactttgggaggctgaggtgggcggatcacttgaggtcaggagttctagactaccccggccaacatggcgaaaccccatctctactaaaaatacagaaattagccaggcatggtggtgcgcgcctgtaatcccagctacttgggaggctgaggcatgagagtcgcttgaatccgggaggcagaggttgcagtgaactaagatggtgccactgcactccagcctgggccacagagtgagactccacctcaaaaacaaacaaacaaacaaacactatttaaaacaagacacaaagtgagtttaatgcaaacttatttagttagcattgcatttaatgttcaggaacacatgttccattttgtagacttcattaattacaactagcagttatttaagtgcttactagagacattgaatattctaagcaccctgtgagtattatgtatttaatttgcacaatacagtgaagcagttactttatcgtacccattttatagatgagagtgaacagtagagaggttctcattttgatggttaatattgtcaacttgattggatttaaggatgcaaagtattgtttctgggtgtgtctgtgagggtgttgtaggggagattaacatttgagccagtggactggagaggaagacccacccttaatctgggtgggcaccatccccttggctgccagcacggctaaaaaaagcaggcagaagaaggtggaatgagcagactcgctgagtcttccagctttcatctttctcccgtgctggatgcttcctgccctccaacatcagactccaagttgtttagcttttggactcttggacttacaccagtggtttgccaggggctctcagacttttggccacagtgcactgtcggcttccctacgtttgagtttttgggacttgggctgtcttctttgctcctcagcttgcagatggcctattgtgggacaccttgtgatcatgtgagtcaatactccttaataaattccctttcatatgtacatctatcctattagttctgtctttctcgagagccctgactaatgcagtcatggaggctggcgtttgtacccagggtctcccagtccccaggtgcatgctcaatgtgacagggctagttagtgcaaagccggcactagaatccaggttctggattttcttcttggtgttctttcctctagacttgaggttttgaattgtgttcctgaatcttttgggtcctaaaaaagtcttgggacctgctgcaggggttgagaagaagcaaagctcatgtgactctaggcccttactccaaagtccaaccaagtagcatgctttgaggtaaattatattgtgttaaacttaatatatgatacatagtataatgcaatacttaatatatatttaatatatttgtaacatacaaaatacaatatccaagagcagtatggaacaccaaaaggtgttcagacttttttttttgagacagtctcgctctgtcaccaggctggagtgtggtggtgcaatctcagctcactgcaacctctgcctccctggttcaagcaattctcctgcctcagcctcctgagtagctgggactacaggtgcccaccaccatgcctggctaatttttttttgtatttttggtagagacggggtttcaccatgttggccaggatggtctcgatctcttgacctcgtgatccacctgccttggcctcccaaagtactgggattacaggcgtgagccccttccttcaaatggaattttatatctgtgtttacattttctgcttaaagtttgaattttgtttaattcaattgaatttccacttaaaatgtaaacttttgaaacccacacctctgacatattccacattgctgttggatatttttagtttaaagatttggcctgtaagctgtatcggtatcattattctaacttcaggctcaaggtctcagtcactagttaaagtcttttctaccggcaaatctgtattaccatctactgtggaagataacctctaaagtgcccatgtaagcacaaatccataaaactaaaagtcaaagaaaaaagagaaagagtttattccactgtttaaaagttcagtttgatttagatcttatatctcttgggttttcttgactgattttttacataaatgtgtcccagaaagagtgatcatatcgtgatctttgttcccagttttccttttccacatcaagttttcctgatggaaagtgatttaaaaaaacccttaaagtgtgataatcactctcttctttagtagacagtggagtttaatagatgcatacagcagttgtttacttgtgatgaaaagaaatgtgaattttctggtgcaaggacatttctagctcatgtctaaattgcagagagaccacagtttgacatagtgctgaagcaggttgtaagaggtaggggtacaatgtatgtctgcacaggttgtgcactatgcgactgtgaatggtgtcttctggaattgtctatgcggaagcactgtcaggaggtcgtggattccagcctctgttgatttttgtgcatgggagagcttgataccaagcctcaaagtactaggaataagaaggtattacatgctgtaattttcaaggtggtgcctttctgtacctccattgcttttagtttagggcatttcttctgcaatctttggagggttcctaggaataaaaaagtagctagtttgagacagtgtgcaattgtgctgaaatggaggaccatgggggtagatgtagttcccttcatgccagtagctaattggcttagtttgctgatttgttccaggatattccctaaaaataggtgtcttctaagcctcagctttgggccttgaggtatggcatggctatccgctctctgctcctgctgagctaaatgcagtcctgaatgccaaatattgagatttggaattatcaaaggactattagcatcaaattgagaaactcaagctaaatttgcaaattaatacaaaatcatgaactgagcttctcttccagagaacctcttgtaacagaacttgaaggtggcaggatgtcttgatagagcgtggattttagagctggatgcatgctgggcttatatcctggttccagcatttgccttgggcaagttatttacaacctctggttgaggtggttggactagttgatatctatgattcctttttaagtaaataactattagttttttcatacagtataattactatataacaaacatcttcttctttgatttcattcatgcattcaaagtatttattaaatgccctccaatgccggacaccatactaggtactgggtatataagagtgaaccaaatgagcagggtttctgccctcagggagttgataatctagtggggaaggtgttggggatgatggttcatcaatagtaaagaaacaaataatataactacaatcatacttgctgtgatagagaataatggggaggacctatgtattagtgggggtactctagagaaacagaaccaataggatacaaacacacacacacacacacacacacaaatgtatcttgtgtatatatatatctatatgagagatatatgtatatatgtacatatgtatgtgtgtgtgtgtatgtgtatatatatatatatatatatatatggagagagagagagagatttatttattttaagaaattgactcacacaattatggacaggtcccaagatctgcaggtgagtcagcaagctggcgacccaggagagctgatagtttagttccagtgcaagtctgaaggcctgagaaccaggaaagccaatggtataattcccctgaaaagccgatatttcagttcaggtccaaaggcaggaagaattctctcttactcaggggaaggtcagccattttgttctattcaggcctccaaccgataggatgtggaccacctatgtcgtgggagaaatctgctttactcactctgctaacttaaatatgaatcccatcagaaagcaccctcacagaagtacccagaataatgtttgaccaaatatctaagcatcctctgacacagtcaagttgtcacataaaatgaactatcctaggctacttagagtagtcagaagatacctctctgacatggtaacatttaaactgagacccaaagaatgggaaggagccagccgtggaagaatgggggacaggccttccaggcagaaagaaactgagtggtaaccgagtggaaactgaatggaaactggagtccagagggaaaaggggcatgttgtgagatgaaattagagaggggacagaggctttactgtcagaccttggaagccatgataaggggcttgcattttattctagatgcaacgatgagaggcactgagtttgagcaccttggaagccatgataaggggcttgcattttattctagatgcagtgatgagaggcactgaaaagtttgagcaaggaggaatgtgagaggatttatgtttcgaaaagatttttctgactgctctgtgggagtgggtgagagtggaaagtggggagacctgagagaaggctatggctggagcctagtagggagcaggtagcctggatggagggccagggggacagagggaagtggattgtttgcaggtctattttggcggtagaaatgagagaactattggggagggacaggacaagagaacagaaagtaaggctgcctctcaggatcctgcctatttggcttgaacggtttgggtgaacattactatcattcggggaggtgagacttccttttttggttgggtcaactaacaagcgcaattttcacttactaagcatgagacacacctgaggtatccaaatgaaactcaatagtaggcaattgggtgtgtgaagctggagttccaaggacattttgggtctgggtgtatagacctgggagccatcagcatgtaggtagggattacacagggagaggatatagaacaaaaggggtgcagaaaataacccacggaagtccagtgtttaggcagaagaagaagtatctgcagagtggatttaaaaagacccaacgagagagggtggaggaaagccttgagagtgtgatatcacagaggctgtaagcagggagctttttaagaaggagcaagttctcctgtgcagaatattgctgagaggacaagtgatgtgtggccgtgttggtgtcccctgtgtcggtagcagagatcgttagcagagcagtttcagtggagtgacaggagaggaagaccagtagattttatgcagttttaggatgggtatcacccagtgtattagtccattttcacgctgctgataaagacataaccaagaccgggaaggagaggtttaattggacttacagttccgcatggctggggaggccccagaatcatggtgggaggtgaaaggcacttcttacatggcagcagcaagagaaaatgaggaagaagcaaaagtggaaacccctgataaacccatcagatctcatgagacttattcgttatcatgagaatatcatgggaaagactggcccccatgattcaattacctccccctgggttcctcccacaacacatgggaattctgggagatacagttcaagttgagacttgggtgggaacacagccaaatcatatcacccagtttagtacttcactatgtttttggccaattatgttgggtaggggatggttgtgctcctcctgtcccttaccttagagctggcagataaaataccagatatccagttaaatttgaatttcagaaaactttttaaaaaagtataagtatatcccaaatattgcatgggatatacttaccctttaaaaattttgttgctattgtttatctgcaattcaaatttcactgggtgtcctgtatttttgtttcctgaatctggtagcacacattgaattgcaccctttaaaatggctagaatagggaattttatgttatgtgcattgtaacacacacacacacacacacacacacacacacacacacacacacacgtatctggcaattctcccttaactaaactaccatgtagaagctaccatgcgatgcagtctatttctaggtttagccacaagggtcaataagaaaatctgacctcaaaggaaattatgtctggtgatggttaatgcttctactaagttcccttagagcataggatgctgagcccatagtaggacctcatcaaatgctggtttgatagaaattgcatttggggaaaattagcagctgttgataactgaatggaaagaaatgaactaccctggtacctgtggtacaacttaaagaacaccatgaaatgggcctcatgggaggttctcaatgaattcagtggcgtggcacttttgggcatgcttttggaaccaagtacttactccatgtgcctgtgagtttggcacctctcatggcagcccaagtgcaactggtttctgaggggccattaaaaatctcccaatggcagacaactctcagacatgcctgcaaattccaagacagccaggctgatcatctgctactttaattggttataccagtttttatgcctttgtttctcctcctttctgtgaggtggaggaaacataaccacaagactgtttccagtgacctcttcagaggcaatttccaagcaattaagtatgggttgaatccaaagtgtattgatgaattaaattctgttccttggctgaagattctgttccttggctgacacctgaactcaaaggttagattgaactatctaggaaaacggtttttctcttgtgttttcctgcaggctttgctgtttacgaagatcttgcatcaacacttagcattcactcacatggcaagcttgcatgtggtactttcattccacattaatttagggaactctactatgtgccagcattcaatatccaatttgtcttagattttcgaatagtgtcccacaattttataactggggagttccttgaatggaaatatgttcacagtggctgcttaattgtgactaacccatcacatagagactgctttggtaatagatttgattctgagggtctaggagaagggacacttctcatatggggaagacgggattaatccttgaaaatgatactgaagccaacttctgtaccagtatagcagcttagcagacttctatatgatccatgtaagggtctgtttgctctctgagattttgggtgccttctctagcccctgagtgctgggcttcttctgaattccataggggtggaggtgaagataccgccagctctcacccaactcatccattcctggacagcagggattctgctcatcaccttggtgcctccgatgcctgaagcacaataggccctcagcaaacatttgttgaattcatgccatgaacattaatcgagccctttttatacactgtgcactgggattgggaccatggaaaatttagagaggaaaaggtccaccttcaaggggcatctagaggaacttatcctctagcaggagaaattgctaatgagaaaaggtattttggggagtggagtgaggtgttggtctagctggcaggttcagcctatgctcagtggctctctggtatggaaaattcctcagaatgttgattcagccatagatttctctggcagcactgactcttgccttccttcggccacattttattccccaaacctaggtgttactgggaagagactgagctgttttattgaagataattgactttcccagtttttaagtaagtctgttgattcctcgaagacttcactaatcagttatgaatatttcaaaaacacttcccagtcttcagatgaatggatttgtaggttttctacattgctgtctccctagccccatgaggaataatgtgggtatccttttcccttttaggtttctctcttcctctaacctgcgcccactcccagcctctgatagatgcatttgcagtaaatcacagaaatgttgctgatgtcagcagcactgatatgcattagaggagccacttcagaggaaattactcagagggtgatgctgaaatgcaaagctgtttggtagggtattttgtagaaactgttttctccctttgatggatcttgtttatttttttttgacttagtaggcacagtgaaggaataaccatccaaatgttttttttttttccatttaagttttgtataggaggttttggtgactttgaaatgaaccaggagcactgagcagctacactgacaaatggagatggctgaggctgcttgcaaagcagtgtgttggggtgtggagcctccatgtcagtgacctggggaaaggcaacagtgagggcacacctcattctacagaaatggtttaaaaatatacatatgataccccacttttgatgcacacagactgtgctgtttaaatgctttcgatggaaaatccttttgtaaagtacacgtctatcttgcagagtaggatttctgtatatgatctcaggtttgtttatagggaggtacacttggatgtcttcatgacatttatcatgacagctgtagctgagcagagaaagagggcaggactgccatggggcatcaagggccatttgaagaaggaaatggtggactgagagtgatagcgacctgtgaggctgcctggtttctgtagcagtgttcagcagcctgtgactctgagcagagagaaggaatattatacagggatatttccaggtagctccaggaaaagacaaaaggggaggaagttgagtctgttagctaaagagcagtgttgaatatgggatccaagttgggtggagaagagaaagagaacacagggagggtaggatgacaggagaaagtagaggcagggtatgatgtgggagcgatgagggtagcaagctggaaagagaggatgatctagtcaatgtcttagtgtgccttagggctactataatgaaataccatagactgagtagcttttgcacaacagaaatttatttctcatggttctggaggctgggaagatcaagatatcaaggcagattcagtgtctggcaaggatctggtacctgattgacagacagctgtcttcctgctgtgtcctcactcggtggaaggaccaagagatctctctgggttctcttttataagggcatgaatccaattcatgagggctcagccctcaccatctaatcaccccccaaagcccccacctcctaatcccgtcacattgagggttagatttcagtgtgtgaattttgggggacacaaaaattcagaccgtagcagtaatcgcttcaactgagtattgagacagttcttgtggtaacaaggtttagggtgtggccatagggagactcagctgtagtggagctgttggggctgtgccaaggtcacccagatccgttttgttctgtgcacctgtcctttagcttctgggggcttctctctttctggcctgtacctacagcctttttcagaggactctccttggtctaccggagcctattttcaggatgttcctaggagttttttgagatggagtctccctctgtcgcccaggctggagtgcagcggcacaatctcagctcactccaacctccacctcctaggttcaagccattctccagcctcagcctcccaagtagcttagattacaagcatgcaccactatgcctggctaattttttttttttttttttttttttgtatttttagcagagctgggacttcgccatgttggccaggctggtctcaaactcctgacctcaggtgatcccctgcctcggcctcacaaagtgctgggatgacaagcatgagccactgcgcctggccatcctaggagtttgtatcacccactccttcacggtttgtctggagggatctcctaaataaataactcacaaacaaattctcatccgggatctgcttctgggatacctgccctgagttagtggttgagatggaatggagatgatggcaatggtgataaattcaaggaaatgggaggcttgggtcttggctgggttgtgtgtgggatgctgaagtcacttaggagggaaacaggacccagagagaaggctgcaggaaactgggggagcagccaggtctaccactgatggccacggggaagagtaggaagtggaggagccagagggctggggtctcagaggaactgcgggtttgacacaagaatatggggtattggttttccaggacaatgtgaccctgatgttgtgggcgagggagactgaacagcccctaccccagagtcacactgacagcacagtgtcctcagggaaagcccaggtatcaggagaaaaggcgcaggaaggggccctgaagaggctgggggcatgagggagtcttcagatcttcagcaggggcccctgaggcatctttggaatggtttggggtaggggtgaggggaaggttggatcagaggggaggaggctgagagcagaagagagaacaaagctacaccaagtggcctcactggcctcacacttctcagaattggtcccttcagacccggtggtgggtggcttggcagcctggatgtggggtgtggagattggtactactcctggcacacagggggcatgcattggttgaataaacaaatgaatgacacatcaagtttgtagatgccccaccttttcatcattctgaaccattgtcacttccatgtattttatggtctgataaatatggaattaatcgaagtacctctagctatttgttatcaccattattgggtgggacacagcgaacagatttcttaaagctagggaattatgcaataggacatgttacggacttaagccataagatctttttttttttttttttagatagagtctcactctgtcacccaggctaaagtgcagtggtgcaatgtcgactcactgcaacctcctcctcccaattctcctgcctcagcctcctgagtagctggaattacagcgtgcgccaccatgcctggctaatttttgtatttttagtagagacagggttttggcatgttggccaggctggtttggaaaggatctttctaataggccaaaaaatatttttcagttttgctttctactgtggatctgtagatccacagtataactacttatggtctatttgcttgtgattgcagatactgaaggagtttgctgggaagggagaagtgtgtgtggaagaagaggggagggctggagaagtgagatgagccctgagcacacgggacattggaggccagggaaagaaccatggcggtgcttgtggagttttaataggtgcaagctgggaatttcagaaggctcacctggctgctgagtggagcctagggcagggtggggggtggggggagacccctccgggagccagtgaggagagataactgcttttgacaagacacctgggaaagacatctggaaggaatggcgttgacaataagatttaaaacccttggccccagggaaaggggatattttgagaactatgactgcttgtattacttttaatcccaagaggaggataaaggtctttcctgtataaagtgcgctagttaatttaaattgtggaggaaaaaacttagggcaagagacagaatatgatattcaggaagcattttggaaaaagacacaaggaaccccagctgtggctgtgtgcacctttagggccttgatcatggaggcaggataaagaagtccatctcgtcaacatggcggagtcagagtctattgggagaatcacgaggtaggcagctctaaatcccaaaagatggtggtccagtcggatatgcctgggctgctctgaccagctcagcacacacaaggaatagctctggtcctgggcaatttgtgccctgggtcggagggtgagagtttattttatcggaacaataaaggcatcccacctgctaccaggagcaaccaaaaatgctcagaagttctggaacaggagtgctgttgaacagggtttcctggcagcccgagatagaaagtggtaaaaacagcaaaatgctgctatggtatagtactgaagtcatcaggcacacactgagacttcctgtgggtcaggccttgtgaatggtgctggagacagagactgggataagatctaccatctctgatgctgacgcccagcccagttctccccttttcctctctagttttttctttctctgtcatgcatccccctccctttgctgtcccttaaatgttgctcccttgagcatcatcttttactctcttctcattttacatctccctctggaccacttcatccagtcctgtggcttcagtaccacttacatactcatcactcttaaatctagggattcagctagattattcccctgagttctggtcccttatgcctcatgttaactggatagctccacctggatgggctacaggagctgcacacctaactctcctgcattttctgtcttgcagagcatgatactgttataagcttataagagtcatcccagacgcctcctttcttcctttgcatccatcactaggacccgcacattttacttccttaacacgccttgtctctgactcctcctctgctgctgcctgagttgaggcctcataatacattccagtaaactcctacccacaccccccacagacgatctctcacttgctgcatgtctcttacgcactgctgccagagtcagcttgctaaacccaggtctgaccccctggctcttctccctgtgttagccttgatggcttcccacgctcattaataagaccaacaagagccacactctctcctctgcttgtctttgcagctttattttggtgtagccatcttcacaccctctagtcctgacacgcagacctgaggtaatttcccaaatgccccaggctgattcatggctgagtgtctttgtatctgttgcccccccattgctgttccgccttcctctccacctccttctgccctctcgcagacacctaatgccctttccacaccagtgggcaccttgtctttgcattctcgtctcctcttcggtggcactgacactctctcttcatgtctttctgtcccccacacctctgtcaaacacagcatctgcacgctttgttgcatttgcttgcatagaacacgtagttttcttcacctcctaataatgtggacagctcacgttgattgaggacttgctttgaacaaggcattgagcaacatgccgtacattttatgttaaatcttcccaatagtgctactgcttctgtccctttccagggaggaggaaggaggcttggagaagggactgtcttttaggagccctgcccagtgtttcctgtggagggtggggccatcgtggaagacagacctatggtaggggtaagctgggtggctgttgaagtccaaccttccccctgcttcctctaaccctgataaccttgttctctggggcctgtctgctagtggagaggcttctgactttttttttttttttgccatacctttggtttataaatacaagaagagatttggggaaaaatcaggggaaactgtcgagcttacaagtcccgagaaggaagtcactgctcctttaagtctcatgtgaaccccttgttctctccccagcttgtggggtgaaagaaaagccctttagtcttttgggtcctcaaatcacagtttatgcagtttggccccagtcagagggaccccaggaaggcagactcagggtaaattctgcctgtcttccaccagagaggggactcaccaagtgtgactcatgccattcaatagaatttttaaaatctcacaagtattttgtacccctgagtaaaagagaggcttgtagctcttcatgaaggaacaagaaaggcccgaactgagtgtttggagcccagtgaagtaaaatactgccctgtctcttgtctgtccactctagcgcttgtacaaaccatgaagaactctctttggactgtttgctttttgagaatgttaacaccttgactctggatttctgcctatgggaaaaaaccacaatagtgccaggggtgcttccatatgcaggattaactctgcagtcaaagtttctgttgggcaggtgtgtgaacttgataccataaatgctggcccaaagcaaatgggagaatggatgaatgaacaaattcaggaatgaaacaaactgtaaccaggggtctcctagttgtaggttctctgctaaacttcatattgagacacaaaggaagggcatcttataatataatgttgggggatgagcagtcagcttggaggtggggacacgtaaggtgggttttgatgtttgagaaggaattgaccaaaaaaagagtcaagaggtgagaagaatctgggaagcgagacctgtttctctgggacaggtgtgagcgggtctgggtgctgctgggtttggctggggcaaaggttgcttgtgggggcgtggcagtgggtgaggcctgtgagataggcaggcgccaggtcctggaagggagagtcagggagcaaggcatggagcctgcactttactctgaatgttggtggcgccttcagagcattgttagcaagggtccatgtgatcacactgacacctgagagagtgacacaccatgtacatggctggtatatggaggatggatttaagggggacaggactgaaggctgtcgcagtgattcaggtgagagaagatggggttctggactaaggggacaggaaagcacagatgtgagatgaggtggcaggcagttctagctccctcttccccccagtctgccttgttttcctcttctcatggctccatagggtctcagtcatttcatcatagcttgatctcttccatctggaagtgcagcctgaaattttgaagacagcagggagcaatgcttcacccaaagggagagcctcgggtggcgttttgggaccatggcttgctctcttagtgcatacagacttagtgttactgccattcttactgggatcagcttgattgcctttaaggtagggctgtcccatggaaacagggaaaacatgatttggttgtttgggtatctggaaccagaggcagcacagatactgctctaagagctgctgggacaactggaggccggtgtgggtggagcacccgaggtggaatcctgcgctcctcatctttcctgccctcttcctaacaccctccctccccagcggcctgaagtctgcctatgcctatgcaggctgagctgtaacctgggactctttggaagctctgagccatcagtgcaggtggccccggaatgattccagacctagagtaggggtgggaggtcggctgcggggaggggggaggtgagaggaggctgtcctttccctcttgcccgggagtctgcagtcacagttgcactttgcctgggtcagtagcagagtcacgctgctgtgtgaccgtggcactgaggcagctgcatttcaggtttccaagagactctgaacccttggaatgccatttgtttcaggtgacatggaggaatggaggcactcgggttaagtgtctgaagatggattcaaggatgcccctgcttgttagcttgtcataggttgctcagtgtcccctctctggcccgtagtttcctcatctatcaatgggggcagataataatcatcaccttacacagaaggtttggcgaagataaaaacaggttcactggctgggtgcagtggctcatacttgtaatcccagcactttaggaggtcgatgctggcaggtcgcttgaggacaggagtttgagaccagcctggacaatgtagtgagaccccatcgctacaaaatattaaaaaattagttgggcatggtggcatatatctgtggtcctagctactggggaggctggggtgggaggatagctcaagccaggaattcgaggttacagtgagctataattgtgccactgcacttcagcctgagtgacagagcaagatcctgtctcaaccaaaacaaagcaaaacaaaaacagcttcatgcacgtgtaagatctttgttaattcttccattaactctgaaggcgggatgcgtcttattaatttatgtagctccagtgccaaatgcagtgccaggcaaactcagttgtttgttgattgaacgaatgaatggatggtgcagtaatatctgtggggcttgagaaagcctgaataatgtcaacttattaagagcttgttcaaccatgaaaaagcagatttccacatgtacccctccatatcacccacatttaggtgaaaatgaaatatgtgccgtattcttttttttgagacagaatttatctcttgtcacccaggctggagtgcaatggcacgatctcggctcactgcaacctccacctacctggttcaagtgattcttctgcctcagcctcccgagtagctgggactacaggtgcatgccaccatacccggctaatttttgtatttttagtagagctggggcttcaccatgttggccaggttggtctcgaactcccagcctcccaaagtgctgggattacaggtgtgagccactgcgcccagccatgcagatattcttgaggaaacattttaaaatgaaaactagcagaaaggatattacctttcaacatttcctttctcatcaattcttggcagcacttttgctgcccagtactcttctgttggagctgtgaagtgtgataggccattactttatagatccattcattattgatacgttttgtagggaagaactccactgctgtttggaaactgaagtagtcaatctcatagactggaaaatatttttaatgcctatttgaaacaaatgtcgttcctattttttgggataaaagggccctttccccctggaattgctatgtttcctcttttcctgttcctacactctgcagaactgactttgaagtcagatgattccctttttaatctggcttctctcttttgggccgcttaaccttgacttagccattgaacctgtctgggtctcagtttctttgtctgtgaagtggggctgtgttgggcatgagcatgcgcctacaggcctctaactggagtgggtgttggtgatcagggccctggctgctgccctgatctccacagctgggcttgcactgcgggtacgttgctcccgggctgctcccagccagtgtctgtgcgcagcaaggataccacggcaggattgtttctgggagacacaggactcctcagacagctaacttcagctcaagaactccttgatgggcttgctaaacttccttaggctggaagatgcttacctcctccttccttctttccttccttttccaggggtcagacttacatagagtctagtggctgttctagcctccccaactccctatcattttctctcacacatgcgttccccctaataaaatccatgcacatttaatcccttcttggcatctgcttctgggggtcctacctggactcatgcagtgtgataattccttgtagtgaggaccgaatgtagtgatgtaagcagagtgtttgtcagagtgacagcatgagtaagtgcccagtaggccatcagggctcctgtcaccttcaccaccatcagcaccaccatcctcatcaccatctggccaagtttgcttctttgttggttccaggcatgagaactccagtggttgattccaggtcataaggcaactgtattagggtgagaacaactgtggcttctaaggagaataaatggattaatgaaaatgccatttaaaaatttatccaacttggctggatgcggtggcttacgtctgtaatcccagcactttgggaggctgaggcgggcagatcacctgaggtcaggagctcaagatcagcctggccagcatggtgaaaccccgtctctactaaaaatacaaaaaatcagccgggcatggtggtgcacgcctgtagtcccagctacttgggaggctgaggcaggagagtagcttgaacccgggaggtggaggttgcagtgagccgagattgtgccactgcactccagcctgggcgagagagcaagactccgtctcaaaaaaaaaaaaagaaaaagaaaaagaaaagaatttatccatcttaagcacaatccagatccttttctagccattgagatgtgcagtcttctttgccaaaacaaccaagtccctttttagtgaaatgcacaaaaggttttgtaacattctgagatctgtgccggtactcctgacaactacaaatatactccagccagtagaccagggctgctcatttgctgttcctgagaaccctgtggacgtttagaaaaaaagatggctgctattattcacatttcacagtaagcaaacagagaaactaagtgacagtttcgaggtcatgctgtcactgatggatttgggactgaaactctggtttttgctctggtgctttggaagctcaggcatgggtggattctgttcaaactctgccctaatggacagtctcttcgcaaactggcaccaggacctggcctgaagagacgtttctcaagcccaattctgcccagcctcagggatgctagaagcttgggaagcatccatgatgcaggtcagtgacggagtccagcctccactcacctccatgctcatgctatttattgcatgtcagctgatgaggctttaagctaatgttggttacctggtgctgtggaacatgttccttaagctgactggcaagcccctgaggctgggagggactgtgccttatccccaccataccacacccctttgtgcccattcagcattaaataaatgtttgtttttgagagtgctggtgattccgatggggcttttgtgtgaaggaattatcaccaccaccaccaccaccactggaaaacaacatttgctctatgccaggcactatgccaagaaattgagatccaatgattaaaagatgaactttctgactccaagaagttgataggctagtggggaagatcagcacgctgggcctgcctggaagagcccaggacgacttcatagaggaggtagcttttggctgagactaaagaggatgggagttttccaggcagatgagggtggggaaggggttactggctgagaggacaacacctgcaaaggtgtgaaggtgtgaacagagcactgctgtgtttgaggacctgctttcagtattgctggagtgccaaactgtttgccatttgacgctgctcatccacgttgtctgtgtggtttggatgtgccagcattccttccaccctttattcacttattccaccatcattgattgtctacccaccatgtgccaggtactgtgcagaacactaggggtgcagaggtgaggggtagacagggtgcctgccctcatggagctttcaatctaatgggagtgctggacaagggcacaggctgtatcagcagcacagcacagtgagtgctgggcaagggagatgtattagtctgttttcctgctgctaataaagacatacccaagactgggtaagttataaaggaaagaagtttaatggactcacagttccatatggctagggaggcctcacaatcatggtggagggtaaatgaggagcaaagtcacatcttacatggcagcaggcaagagagcatgtgcaagggaacccacctttataaaaccatcagatcttgtgagacttattcactatcacgagaacagcacggggaaaaacctgcccccatgcttcaattacctcccacggggtcactcccccaagatgtaaggattatgggaatacaatttaaggtgagatttgggtggggacacagccaaaccatatcaggaaacctgaactaatggagggcagattcatttcctggggcttccgtagcaaattgccacacatgtagtggcttaaagcagcactaatttattattgtatggttctggaagtcagaagttcaaaatcagcctcacttggccaaaatcaaagagtaagcagtacaggttccttcgggaggctctaggggaggatccttcccttgccttttccagcttctagagggaccacattcctgggctcatggctgcatcactccaacctgtgtatctgtcctcacatcccttctctctctggccctcctgcttccttcttataagaactcttgtcattatattgagcccaaccatataatccaagatcatcccccatctcaacattcttaatcacatctgcaaagtcccttttgccatgtaagataacattcatatatgtcttggggattaggatgtggacctctttgtgggccattattctacctgcccccaaggcaggaggggagaaggtgctcccagaagtgatatttaatatgagatttctggctcagaagcaggatacacatggaagcagggaggccccttgggaggctgctgggctggtccaggcaagatgtgacagtggcctggatgaggctgctggccacaggggtagggaaaggcccaagggatgaaatacagtgatgaggcagaatgaatgggagatgtgggcagtggtaaaagaaagccaccttaggcaaggctcaccttctcggcatcaacaggagcaagggggaaagtgaatgcagcgtctttagggaaaggttagcaagaacataatgcccaggttgctgattctaacatatagatctttcaatcaagattccaggcaattttgcgtttgtgtaaatctgagggaaatttaacatggagtgattttattggattggataatatgccataaaagactgacgttcagctcggtttccaaagacagaaactgattccgagggcctaggaggagaggcagatgtttacaaacttagattcttctaagccatcacctctacagccaggtgttttgaacaggcagtgacatagcctgctctttgacttttccaacagtgattgagcagtttaactccctgctggagtgggactgtttaccccacttaggtaattaggtttatcatctactaataccttcttcacacaacagccagcctgcaccatgacagagactataataagagttggaataataaagggagaacaaaactgaagtgcagtggctgttcgttgttgcacaagacatttctgtgatgcatgatagcattgcgtgtgcgtcataaccccaaacttcctgccatcgcagaaaagcctccagctgaacctatttatttccaaagtaatgaaattgccctacagagaacagggaccttagagaattctatgtgcttcgaaaaccaggaaacagtttttttccaatgacgtcttattggaaaacaatagaagaaaaattctattactagtagatcaggagtggttatgcctaagtcacatcttctattaagatataacaagctcatccttttttcctttgttttgtgacaagaggactttttaagtctctagacattcatctcttctctgctgttggtatcaccagcccttggtgcttggatagagtagttggttatccctctcctatttacttcctctccaagttcaacaacatgtttgtttttaaatctgatgatttgttgtattccttacacattgtttcaacaaggaagctaagggaggaggtgaattataaatggcagagagatagctttcaatttggaccctcgtagaaaaatgtaagtatttcaaactcagtttatactttttttttttttaaactgggacccctggtgcttattttttagaactcaaatgggtacctagcaactgatcaaattccctaactgcaggcttggtgaaccagcgtttcatcctcacatttgaaagctggctcaaagaagacatctgtgctttgtttctgacacgttttgtatttatttataaacaaactctcttcttctttgtcccccaccctgactcctcagtggccgttcccgcagcagcaccggtgtgccagcccaagagcgccactaacgggcaacccccggctccggctccgactccaactccgcgcctgtccatttcctcccgagccacagtggtagccaggatggaaggcacctcccaagggggcttgcagaccgtcatgaagtggaagacggtggttgccatctttgtggttgtggtggtctaccttgtcactggcggtcttgtcttccgggcattggagcagccctttgagagcagccagaagaataccatcgccttggagaaggcggaattcctgcgggatcatgtctgtgtgagcccccaggagctggagacgttgatccaggtgagcagggagtgagtccatcttaggccagctggtggggtggatggcagtgttggttttatctttctgggtctctagtcttgccttcagttgagaggctcttggtggtcagggaagttctctccagggaggtgacatgtgagctgagacctccaagaagcgatagtgaggcatgtgacagtgtgggggaaggagggtccatgttctgcatctggttttggatgagtggtcagaggcggcagcaggccaatggactttggattttcaagttcaagtccacctatgtgtgctgattaactccttgattctgaactctgtggaatgctgggatagaacccgaagaaggaaagaattttaaatatgcagatttagaataagcagggatatattaacctgtccaaggtccatgaggatgaggtagagaagaggccaccaggtatgtgggtgaagaggctgtcagtggcctgagacagctgttatagtggatttatggggatgaaataatatggatcacagtagtagtaatcatcaggtttgctgtttttgaatacttactgtgtatcaggcactgtactaaggcctttacataccctggatattaaggaaaaaagattcttaggaaaatggaagcagagaacttgaactgcagcctaaagaagcaaggcaacacttctgggcgacagatgtggacttggcaggggtggactgtggcggtaaggagctataggaaagccagagagtcatctgtggggctgcggtgcgagggactggatcaggagggttgtgaagtctgagaagccagagagaaaagcagttcccacgaggaagaaagggaaatggtggagagccctgttggagggcttcaccttggacgtgaaggaggaaggctgcctctgaggctgaagttccactttctatcccagacaccctcctgaactacaaagagtgggttttggtggaaggcggtgacatttatggaggtgagggagagtctcatctttctgggggctctaaagtttggaaggtggagggatggaaaagacagcttttacaattccttctggctctggaagatgcacattaaattctaatggctgcaacaatccaagatagtgtaggatttaccagtctgcgctgttttcttatttatttatttcttaccataccaatagagtaggggaattctgatgctgcttatgatctggcaccttcatagcaatcatattcttgtcagttagttttaataatgacttgactcttaaataaatagaaatacaaattcttcccttcctgggagtaaatatgatttcatagctatgccctataattcttctcaaaaaaataaaatgttaaaaatccaagggcagcatttcatataagtgtttcataggaagtcagttctccaaatggctttgtcttttttttttttctttttcttttttgagacagggtctcattctgtcacttaggctggagtgcagtggtgtgatcatggctcattgcaggttcaacttcctgatcgaggtatcagctgatccttctgcctcagtctcctgagtagctgggactacaggcatgtgccaccatgcctggctactttttgcatttttttgtagagacaggttttcaccatgttgcccaggctggtcttgaattcctaggctcaagcaatcaacccgccttggcctcctaaagtgctgggattacaggtgtgagtcaccacgcccatcccttttcttctttcatgggaaaatgctaccacatttgtggtgatgagatttttgtactaatcagtgccagatttaaagcctagcatgctatagagaatggaataaacaattctggagtagttttaagtaggagtataattacatttatacacattgttgtgatatgaggtaggatcctttttaattagttgtaagacacgtcataataacctgataggcgttctgaagtgaatctagtattgtgtttgaattttccttcattaggcagtaagatcttgaagaaaaggaatgcactgtgttaccttttcctccacatgtgacctatgctttgctttgcctctaattattgcccattagataaatgtttttagagcaagatatcaaagcaaattgtagaacactggtgatgtcacaagctatctgagcttatccatgcatttgttgattaattcggcatttccgtattgcccattctttaaccctcatctttatgagagagctcagagacctgaatgaaggacagggtcagagagcgtggaggtccttattctgatgctgccattaagactggtgtcctgttttgacctcaaagatttctctgtgaaatgagatatgtgtgtgtatgtgtgcgtttgtgtgaatgtgtttgcacatacacacgtgtgtgcatttaagataattttataacaatttaaaaagctgctctttattaggcatctgttatgagctgggcatcatatacccattatctcatttaatcttatcaacaacactctaagttcatatcacgattcccattttacaggggaggaaacatcagtttccttaaagaggtgagtaactttccaaccaccaaagtggtagagctggtagtcagcgcaaggttggactgactgtacactctctcatccaaatagtctacaggccctttaagtagatcttggtttataataagctccagtctcttttaaacttgtgctttatgttgaatgctgtattagtccattctcactataaagaactatctgagactaagcaatttataaagaaaagaggtttaattgattcacagttccgcaggctgtgcaggaagcatggcttgggaggcttcaggaaacttacaatcatggcagaagacgaaggggaggcaggcatgtcctatatggctggagcaggaggaagagagagcaaagggagggatgctacacacttttaaacaaccatatcttggcctggcgcggtggcttacacctgtaatcccagcactttgggaggccaaggtgggtggatgacctgagatcaggagttcgagaccaacctggccaacatggtgaaaccccatctctacctaaaatacaaaaattagccaggcgtggtggtgtgcacctgtggtcccagctactagggaggctgaggcagaagaattgcttgaacctgggaggcagaggttgcagtgagccgagatcatgccactgcactccagcctaggcatcagagcatgactctctcaaaacaaaaacaaaaacaaaaagccaaacaaacagatttcatgagaactcactcactatcacaagaacagcaagagggaaatctgcccccaccataccccttctcctacactggggattacaattcaacatgagatttgggcagggacataaatccaaaccatatcagacactttccagaattttagcagtcaaaaagcattagatggccaggtgtggtggttcatgctggtaatcccagcagcttggggggccaaggcggatggattgcttgagcccagcagttcgagaccagtctggacaacatggcaaaacccttttgtacaaaaagttacaaaaattagatgggtgtggtggcacacgcctgaagtcccagctacttgggaggctgaggtgggaggatcacctgagcccgggaagtcaaggctgcagtgagccatgattgtgccacagtactccagcctgggaaacagagtgagaccttgtctcagtaagtaaatcattagagttcctggctgcctaacaggaagcatttctgtttcttctccctatgcacattgagcatcagtcctggacctgggatgcttttagatctccatctactatgacttacagattcatccttgtgtttatctacagtctttctcacaatataagttaagcaggtttaactgctgaatctgtgtcaaatcattgcaccaaatcattacattttgcccttcagttcactgataccttcacaaggatgaaagtgtccactcttacagaccagggagctttctcacactttatgcctctgagcagcactgtatgtagcgatcacaagaaacacagtatttaaaaatagtctgttttcacatctggaagggttttcagtgtgctgtgttttaagttggaaagatagtactattgtatctcacccaagtctgaaaggagtgactggagagtagaaagtagatggaaagtatttatttcatcatgtctcttggctggattgagtgaacccctcataaagccaagctggaatgtgtgcttcatattattaataaccaaaatagagtatccagagaagcatgataccctcaaaatggctggatagcctagaagagccgtagctcttacagccatcgtggggagggattttccaacaagtaagaccacttcatggggtactgtgggactccagaggagagtaatgggccactatccctaaaggtgaagaaagatgggttgctgttatgaaggggacattctcatccattcatttagtcattcattcatctatccatccatccacttgttctcagaattgctgctgaactcctgcatgtatcaggtaacatgccaggtgttggggagagaaagaagaagacgcggccgggttcggtggctcacgcctgtaatcccaccactgtgggaggccgagtcaagcggatcacgatgtcaggagtttgagaccagcctgaccaacatggtgaaaccctgtctctactaaaaatacaaaaattagctgggcgtggtggcaggtgcctgtaatcccagccactcaggaggctgaggcaggagagttgcttgaacctgggaggcggaggttacagtgagctgagatggtgccattgcactccagcctgggcaagagaatgagactccatctcgaaaaaaaaaaaaaaaaagactcaccataagcaagttactcacctcttgtttcttcatcaatagaatgtggcctcagggtgctgagaggattaaatgcagtaattcatgagaaaggctttgaactgtgcttggcacacggtaaatgctcacaaaaggattattattgctgcttctattgctgctactgttctttatattattcagggagctcagattttcaagcagtggttcttaatgggatggggtggggtcaccggggaggggatggttgcctctagggggcatttggcaatgtccggagacatttttggttgttacagctggggaggtgctatagacatctagtgggtagaggccagggttgctgctagacatcctacaatgcacagcatagaccccccctcccacaaagaattatccagttcaacatgctcataggttgagaagcactggaggaagaggcatgtaagccaataattacaatcttttggaatagagctatctgaaagacgtccaaaaaatggagccctagtgaggcaaatagagctcagagaatattttgtggttatttatctccttcagtccccacagctgttctgtgaggataatctttggtgcccacatacaggcgaggaaatgaggcagcaggagctgaaatgatggcttaagttcacctggttagaaatggaggatccagggtttactgccaggcagtctgaccacatatcccaggctctgaaccaccatgcactggaacagaaacacgatatctgggagggattcattgggtaggccatggttggagggtatcccaatggctggcatgtggcccatgggaaaatgctaacaagtttgtggtgacaagaatgttatactaatcagttccagatttgaggcattgaaagtgatcagaatggcttgaactgagaagtatgagagtacgtggaaatgagactgggaagggggtcgtgggagctgggctgaggaggtgcttagaggacctttatgttgtggaatgtcgagtcactgaaagctttaagcgaggcttggaagatggaaattggctgctgaaaaaaccttttagcaatgaggaagttgggttggaggaaggagaaacgggaagaaggaagaccagttagaatgttgcaacatcacaggtgagggatgctgagagatagagaaaaggctatatttaagaaagttgacagagaaaacttgaaaattactcaaacctgactcagcaaagatttctgctatgtgctgcatatccctgcatggcctgtagcccccaggactcgggggttaatctccccacgttaaatcctataccacttaatgagctgagtgaattgggcaaatatcatgttgccccggcctcactgctcttctgtgaaatggagattgcgatcacggtgtctacctgttagacactatggtggtctgaggattaaacaaaagaagctcagtaactttgagctcttgttattgctgctgcttatttgttagggaaggaagaaaaaaagaaaccagaaaactcctaactgatgcgcatcgtggagttctgctgagggaaaagagaagaaggtgtctgaaatgactcttgggcttcaaactctggattttctcatagaaaaattttatttctactgttcaagtgcagagtgcccatcacagaagtcgctcccagagtgctaggctgggctgctcacaccatgatgctctgtctttgtggcttgagctcagggaatcagcacagcaagttgctattccattgagagggtttactgtgggcatctagaatgtcatctttatccttcgtcttactggagactgtcagtctcacatttattaagtagacactagggccggctccactgatctctctccccgctgcttctctggtttgaggcacagtttcagagaacctgagggacccggtgggctcaggcggcctcaaagcagcaggtcacctgaccagtggagtgaccacagattccaaggtgtgaccgagtgaaagggcttatatccccaatgcctgactgcagttaaaccctaatgaggtatgtggatcttctagaggaagggccaggcccctttaataaggacccttctgaacaaagagacaagatgctaatccgaattccactaggaccaagtttgatgtcctagggcaagccgcttaacccgagctggggctcagcagttcagcacatagaggacacaaaagatgcatccgtctctagaatcttacccctgagatgtgagggagtgtgcagatgattgtaaatgggtaacttcctgcagagctggtgtaataataaaatatagctaccacttactgattgtttactttcctctagactctgttctaagtgcttgaatcctctagctcatttaactcttgcaagaagcctacaaagtaggtacttttttttattccttttttttaaaacagggtcttgctctcttacccacactggagtgcagtggtgcaatcatggttcactgtagcctggaactcctaggctcaagcaatcctcctgcctcagcctcctcagaacgtttctgggggtaggttggtccaatcccctcagagtgagcaggttatctcactccctggaaggctggcttctcccctgcctctcttcggtgcttgcctccagcaagttactgaagtcctcagaggcctctccaccgtgaaatggacactgtctgtctgtgggactacaggtggataccaccagacccagctaatttttaatttttttttttttttggtagagacagggtctcactgtgttgctcgtgctggtctgaaactcctggcctcaagcaatcctcccacctcagcctcccaaagtgctgatattacaggtttgaggcaccatgcccagtctgaagtaggttcaatcatcatctcattttatggatgaggaaataaatcccaagaagttaaataacttgtccaagtccagacagccaataagtgattaaacttggatttgagccctgggaagccagactccagagcccacacaactgaacccttgtgccatactgcttacttgcatcaatggtgagtatcccctcactaatatgtagacctcttcataaagcttttactccaaggaaaaggctggagggagaaggaaacatgattcaagaaactgggctgtctggcatggtgctatagcactccacgtggggaatattgtgttttcaaagaaagggtgtgttagaaggggaatgatcatggacgttatatcagatagacttggtccctcaacaccactaaacctaaggcccctcctcatattaaagggatcacagtcctcattaggatgattgtggggagtgagtgaacctagcagagtgcctggcatgtcactggcatcaggaaatgctatttccttctcccacccgtctttcttctctcaagcgaaccgagtagacaaagataattatacctggagtacttgcatttctttggcagtagaataaagtaaattaaatgtatttttgaagttgaggtttccatgaacttgatttggcggtcactgtgtcccaagaaagcctttatctttgacgtcctcacatgccgcaattgcttatctccctgttcccagtgcaattgtcttagaagcttctatactgactagtcttggagaaagccataaaacattcctcttttgtgatcctcaaagaataaaatcgtgaggagccttcgctgactgacggggaagcgtagaatgaatgcttcggtttgcagggatgatcattggcagcagtcttttttcaggttatgaattctgatgtttcccagatgtttgaagattttgagtgtcttcaggggagctcgagtggtcccatggctgccatttcttctggtcatagcctcgctgaagggaatagcatttcacgggagtgggtttagggttggatgaggcacccatcgggaaggacatgggatttttcattctaagtgccttgccataaagcaaacgacaggggtctattcctctctctctggagaatgtttctgggggcaggttggtctaatcccctcagagtgagcaggttatctcactccctggtaggctgccttcttccttggctcacttcagtccttgcctccagcaagaggggtctctccaatgcaaaatggtcactgtctgttcatgatagtttttctgtctgaagaaagtcccggggccttcatctgcatggctggggctaggtctggaactgcctggagcatgagccttttggggggtctcttcccacctgctttgtctctctctctctctccccctcaccctgactggtccagtgactctttatgttggtgaacagaaactttaccattggttttcactttatgacgtctatgggcttcccctctctgcccccaagatggcgtctcactctgttgcccagactggagtgcaatggtgagatcttagctcactgcaacctctgcctcctggattcaagtgattctcctgcctcagcctcccaagtagcagggattacaggctacttcaccaccccagctaatttttgtatttttagtagagacagggtgttgccaggttggccagactggtctcaaactcctgacctcaggtgatctgcccacctcagcctcccgaagttttgggattacaggtgtgagccactgtgccggctaaggattttttttttaatcctttccaaatagagtttcagatactttgctcagtactgtgtttgatgagtattatttggcaagatttattattttttcattaaaaaattaaaaatgacctataataattgtatgtatttatgaggtacctcgtgatgtttccatacctacaatgtatgatgatcagatccgggaaattagcatattcatcatctcaaacatttatcatttctttgtgttgggaacgttcaatatcctccttttagctatttgaaactatatactagattattgttaactgtagtccatcctgcagtggtatagaacactagaatttattcctgttatcttgctgtaattatgtcctgtttaacaaatccttccctatcctctgctcccctgactctttccagtcagcattatttattaggcactgattctgtgctggctgggtgctagagagtttacatatattacttagcttcatttgcctctctccattgcaccaagaggcggccactgttgctgccccattttacagagggtaaagttcttgcatctagctagtgaccaaagcaggacttgagtctagctagatctctctgactccagaggccacgctctcttaatcgtactctccttggcttgacacggtgggcttagagagtacataattggatcaagacaaattcctcctgacgaagggaaaacccactcaaacaacatgatgagcaggctcctttgtgacagttagtgcttgccttctaacgcagagctctctctcctgtcctcttcctgtatttgtaacctttctgacatacagagagcctgcatgacaaggctggggtgccagattgttggcctctggcttactgactcattttattggctgtgcgcattgggcctgactctaccatgttttagtggagaaagatttagtctaagatgtgggcagcggcatgtgaggagtgggtattgtgctgtggtcctgggtatgaacctttgatgttgtcatggcaaccaaagctgctattctgcagatgagaggactagatattatgaactgtcaaactgttctctccataaccaaggagatgttggtaatctccttggtaatttgcatgacccataaacatttcccaaggctgtggctctgcccttctgccaagacccgagtcactcacttgctcactcacttactcatttgctcactcacttattcattctttcattcaacaaacttgttgattgcctactgtgctagatgctgggatgtaatggtgaataaaagacagacatggtccctgccttcttggagcttataactaggatgaccaaatgtcccaggttttgtggttctggagtaattgttaatagtgcccctttctctctcagaagtgtcctggggctgggcgtggtggctcatgtctataatctcagcactttgggaggctgaggcaggcggatcacttgagctcaggagtttgagaccagcctgggcaacatggcaaaaccccatctatattaaaaaaaaagtgtcttggtttgaaatataaaatatatagtgaccctacttatagacagtgggagagccaaaccttatgcatgttattacacaaataattgtaactaaaagccagatgaaagttgcaaaggagagggagctagagctatgggacacccaaataggagaactgatttagtaggacaaagattccaggcagagagggctgagtcaaggccctggatgggaggaagcaacatgccatggctgaggacttgagagaagtgagcaaatgtggccaaagggcatttagcaaagggaacttagaaagcaatttggctggagacaggcaggagccaaaccacgcaggtgctgattctgaattttatcttaagagcactgtgaagcttacagttatgttttcagtagcagagtgatataatctggtcaatcagtacattgccattttggttcttcgtataaacccaaagggttttaagttatttgttcattaattcaataactaaacatttatggagtggcaactgtggcactctgctaagtgttttgctctggagttctgaactcaattgtcctcagtggtgccaaaactcaactcttgggggaagcctttatgggccctttatgttgggtcgtgtcctgcttggcaccatttgccccccatttgctagactctcttggatgacctttacttttctctgtcctctttccatgactgtgagctctttgaagttgaatctatgtcttttatcaatatatcccttctgcctggcacagtggctggccaatagaaaatgctaaaggcttgaggaatgaaggaatggtgctttttgtgtctgttctttttttttttttttttttttgagacagagtcttgctctgtctcccaggctggagtgccttggcatgatctcagctcactgcaacctccacctcctgggttcaagcgattcttctgcctcggcctccctagtagctgggactacaggtgtgcaccaccacgcccagctaatttttgtatttttagtagagacggggtttcatcatattggccaggctggtcttgaactcttgaccttgtgatctgcccacctcggcctcccaaagtgctgggattacaggcatgagccactgtgcccagcctttgtatctgtttgaagaccaagagcccttcatttagaactttcacagaaggaaagcaaaaaattcttttgtttctgttttacaagtcttttctttttggtctggttgtcaatagtacttctctggatccgcctcctgtattcaagtgatttttctgtctcagcctcctgagaagctgggactacaggggtgtgccaccacacccagctaagacaaaaactcaccttgttgtcttctttatgcatgagcagattcccttggtatctatagccgtcgaagctttacgtatttccctatttagggacataagaatttttaggaaagcagcgtgttggaaagcacggcacctgagatgttcatggaaatccttgttgtgacttcagagtgcagatctagagcagccctctgtttgtctgccctgggccatcccctatttcaagcagtctttagtccaggaagtttaggtagcagctcaggcagcaggtgagctctggagagtgcaggttcgggttctttgagcccaggggcacaactctgagttgaagtgactcctcctggctgttgctttgaatttagaagagctgccctttcaccagcaaggcagtcacgcaaaagatgcttcaatgtgtgcaagatcaggcctgcagcccccagcctgtgtctacaggcctccgagtcattattattactgtttctatccctggggttattgatttcatcactgtttagtgaaggagatctaaagcttttaagccagaaattaaagaggtaatggaaattggcatgccactggaaaatgaatttgcaaatgagaattcaatgttctaaaaaaactcccataaaaataaaaccaaaacccagaagtgaatgctcctgtgactgcatttttttccaaatgtgcatgggtttgttctcctttagagtgtggctgtatacattatggaataatgagattttgatggtgtctcgttcctacaattgctcttattacttatcacaatacaatgtattcatttatataactaatatttacttagtacctataatgaagcaggtgctatgtttggctctagcgattaaaaaacaataaaaaatgcaagatgcctccaccctgtcctcagggagcttgaggttcagtattaattatatcgctagccaattctggcatggtgcttactgtggacaggaactgctctaaatgcttcacgtgtagtaactcatttaaattttacattgatcctatgaagtggggtaagcaacagaggaacagagaagttaaataacttgcccaagctgaagtgagaggtggaactgtgatccggccaaggcagtccggctctagaatccatggtttttagccatgatgctctactctagtggatagttacagcccagtagctattggttactagattggttctagaagacaaggaagcactcaggtccttagtcacagagcaggagtctctgactcaacctatgggacccccaagaggaccttcattcacctgtgagtcaactgcagtgagtcgtgattacctcctggttgtcctttagagtggcagggctttgtgtcttaacataaggtgttgaagctgggtcacccttttcgatctaaaaccaatgtccatgggttatcattcaggtctgcaattaagagtagcttgtcactttatattgggaacatttatttttccttccttctctatggaaatgggcagaagagatgaaaagcctgctggtgcagcttaactttcctcagtaagtgagtgtttaaccttttgtttttttaaaaatggagatgagacatacaaattatgacttctctatgttgtccttttttttagttggaagaaggtgacatgacagatgagctttagaaaaatgtttagaaggtgaacagagaactattcgtggaagatagaaggctagagttaaaagagaggacttttaaccagtctcagctctgacacttcctaactactataacctcacaggattttgtgaggactaaataggataataaggcggagtctgccacattgcaagtgctggcagctatgattaattttaggagtattctagaactttccctgaagtttctagcattgtctgcacttccttgtttctccccttatcaaactatgctcagggagatttggtgactcattcttaaggaggcacagaaaatgattttttttttttttggcacagaatcttgttctgtaaagggcagtcttgctctgtggaggctggagtaaagtagcacgatcatggcttactgcagcctctgcttcctgggctccaacgatcctcccacctgaacctcccgagtggctaggactacaggcatgcaccaccatacctgtgtaatttttgtattttttgtagagatgggattttgccatgttgcccaggctggccttgaactcctgcgctcaagcaatcctcctgtctcagcctcccaaagtatggggattattggcatgaactaccatgcccagctggaaatgaaatcttaatttgtgattaatattgatcactcaaaagcaacaaagagccctaaggtaaatagctacaataaaagcaagatagcagaagcctctctttttcatgatgttattaatcatctaaatattaaatttcaggctctgttcaatgcaatggcaatggaaggaatagtaaccttccatttagtgcacagtgtaatgaatcagaattcttgtagctgcttttgtagtccagtacagttttttaaaaatagaaattggatagacccatttttaatgggaatgatctcaagtgcagagagagcaaggcatatatcagacactctcctcaggaccagggcaatttttcaacatcagttggcaaatttgttattctgcctgtagagtgtaagtccaaactgagatgaaagagtgacagcttgttagtctgaaagtttattgatcatatcaaagtatacacatctatccctgattccttagtggacttgatactttcctcgtggtttaaaatttgtcttatttcatccttccatgtagtcaaagagagacagaggaaatgcattttccatcataaggcacaatttggaagctacaagagtgcccccaaatatggcctggtctcataagataatatttagatagattagtcgttagtgaatacccaaggggctaatgaattgagtctcagaaatccccattgtaagggattaacttgtagtagcaaggaaagctagcgtgtctaagaccatacgccatgagcaagcatgctagcccatcctgggtttctctctcctcttctccaaacagattctccacttgccctgtcctttctgccagtggccttcactttagatttataactaggctgtaaagttctaatgaaaacttgctgcctggctccctgaggacctgaggaaaggctaatatttgcacataactgggtacttagggcagtaggaaaatacacgtcattgtaatatccaccacagcactgaaggtgcctctttctttacctttttatggtctggtctgctttttatgagggactctgaggtggtgtggcagttaggaaggccacttgattggggtgtgtccactcaggtcagcccaggcttgactgccatattggctgtgtctgggtgggaggtaaaggcacacgtgcgtcagcctgcattctcttcccttcgtcctattgcaggtagctgggtgtcccaggctgggtgtgagccagcctgcccttcccagatgtgggaagctgtgcgtctgagatagagaaaaaagaactcaaagtagagagaagcgcctttgcagagttcaggatggtgaacttcctgttgacaattctaagagcattgtttgctagctttgctgcgcaccagatgtgtactgtacacacagcactttaccattctcagtgtcatgagtcccttgggggcagcagtgttgcccactgtactaggtcctcaccagggctgagttaatctgtactctaggaagtgctccgaaagggttcctgttactaatactcctgaataagaaatgacaaggcacagtgcctgaagtcttatgttcatttttagacaactctgacaacaaccttgtatggaaggtattagtcctcattttatagatgaggaaatcaaggttcagagaagctgaacagcttgcaaggctgaatggttaccgctttatccaagaactttccctgttgcaagagtaatgtatgaggtgctcccactgtcttcctctgcactgaatccaagacatctctgaatcagccacaaaagtgcctcactgggtgtggccccagaaatcctctctgagaccctcccatggttgtttgaaatattgtgaactcaccttgcccttggaagattcacttgtgtggctgtggaatatttatatgtgaaatacttctgaagcaggtgaaagaaaaagtaattgtggcaagcaaattaaatattgtctttccacttcaaacccgaggctcttcggccataaatgtgtgaggaggtggagagatgttgctgccctgctgctggggttttgaatcattaggggcatttttgagtagtaatgaatgtggtctgccagttgcctttctcacagagtttgtggctttcctcccaactgctaatggctggaataggctccctttttttttttttttttttttttctgagacggagtctcgctctgtcccccaggctggagtgcagtggcgcgatctgggctcaccgcaagctcagcctccctggttcatgccattctcctgcctcagcctcccgagtagctgggactacaggcgcccgccaccatcctggctaacacggtgaaaccccgtctctactaaaaataggctcacttttaatacattttagaaaccactttccacattcatgccctcatcctgcctcaatccctggctaaatctccaattcataatccctttgctgactgtgccgttcagggagtaagaacgtggtggacgcagccaccattgtaccctcagatgaagtcctttctcgagagacaaacagtctgttagtaaaatgaccatacatcctgggttgcacctgtcctgtggtcccagcatagctgttaacagagctacctttttatttgcaagttccctgctttggacaatagatcaactggtcatccagctattagcgtccatgcataaagcacgaatctgttgtattcttcagccaatctgagacaaccaagagattactgctgcacctttgtttgtctttctttttggtggcacataaggaaacagagaaacagatgatctcaccgagtgcacagatcataggagaaaagccacagacagttagtggtcccctgtgggtcatcattcatcccagtgcagcactaacgctcatgatggtatcgcacgctgtctggagcagtgattcatgtagctggcgttgcctgatgggaggaaactggtggggaaaacgtggtggggggtcctgtgaggggtccagttacctcctcctcctctctttctaagcgcatcagctacagacccgcctcactttgtgagaggttgcagtttctctcttctgcctgtcaggtagtcctaatgcatggtgtgggggagggaggacaagggagaaagaggggcacagaatcttttagatcctgccctctttcaagtcagctctccacctctttttaaaagaaacaaatcattattattttgttgtttttgttgagttgcttttgtgtttgtctaattttagaaagaagtaaaatgttttcctctcacacctctgggaagataatatatctaaatttattagtttagtttgttcatttatttattgttaacttaaaacattcactcccgtgccatttactgggtagctgagtgggtgctggaaatgccagcttagaggctaaaaaggaaattcaaggaggaatggaattaaaatgtaaagtaatgccctcttatctacagtatcccctcgtatctaattatctgtctacctctattgaattatctgcctgtgtgaattttttgatccttgtaagatctctctgaacttgataatggttgaacttgtaagtgaacaaatgatgctcactgagtctgaaattattaaataacattggttgaacctctaccctgtaacatcttttgagctaaactgttccgagctcagttgtgccatttcatcatctgtgtgctcatacattctaatgggctgccctccattcacttctgcagcctgaatgcaggtaattttttctttttttttttgagacagagtctcactctgttgcccaggctggagtgcagtagcgcgatctcggctcactgcaagctccacctcccaggttcacgccattctcctgcctcagcctcccgagtagctgggactacagcgcccgccaccacgcctggctaatatttttgtatttttagtagagatggggtttcaccatgttaggcaggatggcctcaaactcctgaccttgtgatccacctgccttggcctcccaaagtgctgggattacaggcatgagccaccgtgcccggctgagaaaaatcttaaaagcaaatgcatttaattttaaaatgttttacttgagctcaaacaattaagatcatttgaaaatacttcgaaaattaataaaaattagaactgtaaactcaattagaattattattattgagttaaaaatgatgttgccaattcaaatggtaacgtcagttataacccgagtttgctgattcatttgaattctggttgtttgccagagtttttcagagtcataagatccagatagaaaatcaaacctcattctcagcattggggctttctaaagccttgtcagaaatttggtgactcgtgggagagcttatttttctccttttcattgagtcttgctctcaaggagttagttcagatcatcagtggccctactttgcccataacaagccttatgtataatttccacaaaactgcttccccagggcatttgggtgcattggccattttactgaagatttggcagggagagaggaattgacgtcacagatagaacccagctgaaattggatactagatggagttgctcttcaaagacttgggcattgccgctacggagcctgaatttcccacctgtcagttgacacccctttttgtcgctttatttcttcttgtcctcctttttcagggcttttcccttttctctgatccttccctcttagggtataaaaatcaaccttttcctactttaattaatttattctttaattttattttaacacagagcgactcatctctaatcagcttcaacagccaagtgaagtttggtgtctccatttgcatgttcaaggaagtagtctaattagaaatgatctctcgtgaggtctcttctgcctaaattctgggacaatggctatcctccttcctcatctgtctggaggtgaagatgggagtaggggaggcaacatgcattctaggtaccaaaggtagaggaaaggcaaaaccatccgctttgggccagacagggttgaatcctggcctcttcacttcctggctgggtgacctaggacaagttaattaagtttcctgagcctgtttccccatctctaaggtgggggataatactactttcttgcaagttatggaaaggatagaatggaatcacacacaagttgtagaaaggataaaacagaatgacgcttctagtgcacctggcgaaaggcaggcacttaacaactgttagttcccttttcctttcaactgataaacactttccttgagggttacataggtaaacattaaatatttatgaattgcataattcaagaaaaatgaaacttgaaaaggattcttcagattttttgatgaaacaaatcatcgtccccattgtcttttgtgcaaatctgtgtttttgtttgcagtgctgggtttgcttatgacatttgtgtgcaattctcagcaccgtgagacttgagtgagcctaacctctcttcacagcttgataggagttgtaaatattaggtactgatggtatgatttgaggcaacctaagtgactgaagcctagagccctccctgcggtattatttccaagtgggctcatcagagctgaattgataatgaagatataaacactggtgaaggctttgtggcttggtctgatggtactcatacggcacagtgaaaatggagatgctaccggtggaaaggactcaccatctgtctgccctctagagcagagcagaacatacctctgatgattatgtgaccactgtcaattaggctgatttatgcaaagacagtctgtacacatcccatgcagccagattttaaattctagggtgccaggttttgctagaaacagtggccggctgcggtcttgcataatattccatgttctcttagaggcagaaaagaatagactcacgacttgacagaaggtgcttttttcccctgtatcatccagtcaattgtctatgagtctgccaaatctagctcgcagcatctttttgtacaacccctgagctgaaaatggtttttgcatatttaaaagattatttaaaaaaagaaaaatatacaacagagaaccatatgtggcccaccagggctaaaatatttactatctgaccctttatggaaaaagttgttgatccctggttcagagtgtttgaaataactcagatgaaagaaggcaaaatgtaatgatgattgacttttccagttgtaatctgatttgtgacaaccactgtatgcctgttttaacaaagcttaatgggcattacttaggataaatgtaattacgtttcaatatttgtgtcttgctctccctacatagggttattccaggtttgcccaaggaacagagagtctgtttgttgttctagaagtagctcctgtgtctgtcacctcctctccaaggcttccacctgtcgcttttttatcccagttcacccgtgtgaacagcatgtgtttcggctgccatgacagcacgtcctacctttttccctggcttgaaagaagatggcaggggccagctcaggaagaactgctacggagttttttcaccttctcctgctcgtgatgaggctagggagggatttttagcgtatctttaattgttgccgaagtatgaactcggggaagggggcaactgtgaagcagtgatgcatagactaagtctcctggaagaagcagggcttgaattagacccagaaggatgggcaccgtttgtgggagggcacaggtacataagtacagggaacatgtcatggagtgtcctgcccagagtggggaatttatagcagtgtgagatgaaaatgggtcatcattgtggccagtttgttggaaattttaaggtgtatggaattccaattcagttatcatcaaggagtcattgtagcttatttttaaaaagagcgatgtgtgtgtgtgtggtgtgggggtgggggagagtggaatgacaatcatgaaattggctactgtttggtaaaccctaactgggagccagacatttggctaagggtgttacttggaccatctcatttaatcctcacaacaaccctgtggggaaggtattatctctagtttgcaaatgaggaaactaggctcagagaggttcaaacaacttgcccaaggttctgaagttaataacggccacagccaggatggctcttaactcctgccctgtggaaacaagctcaacgtaaaacattcttacaagacagaaaagagtgaaaaagcaaccaaaatcctgccttgcggaaatgcccactttgggtgaacattcttctagacattttttgtgtgtgtatatgcacagaaacttgtaacattttgcataatctgggccaccccatgcctgcaagctttctataaatgtcaccatattctataccctagcgtttcccccctatttaacactaattttctgattttcacaactgggtgcatagtattttgctttgggatgctaccatcatccacttaaccagttctctctagatcactgcaggttcttgagtaggggaataatgtattggaaccttttttttttttgaagaaaaaaaaaataaacaacttttaaactgagtcttatgctttttccctttctttgcagcatgctcttgatgctgacaatgcgggagtcagtccaataggaaactcttccaacaacagcagccactgggacctcggcagtgcctttttctttgctggaactgtcattacgaccataggtacccgtttgtttgctaatatctcttcctctgcaggtcatcttgagtaagggcgcttagtcagtgttttgtcctcatagcatacactatagtttgaggttcagaggaggcttacgaaacactgtcgtttaaattaatgcagtcattgtggtggctttcaacaaaagccaaagcataatgaagtatctctttttccagaatgaaaggctagcaaacctaatgaaaaggttagaatggaaaatatgagttggtcggttgaactcgggttactcatttgagctcaacttccattttaaaaattgtacttcttattaaagttatatagtaaggaaccaaaatattctacaaaattttttataaaaaacagtaacattctgaccgtctcaccttttcttaccttcccagagactgttgctttcatctgttttgattgttgattttaacactcatccccatgtctttaaatatcatgcttgtgctacttctggaattttcagttttggggattttttttgactttccattgtggaagatgaggagttagttccttcttcctgcctgcctcatcacagaagggctcttttcctgtcctcctgtcttcccaatatttaattagatagaagtgaaacatctgcatgattttgactagataaatgctttctgcagctgatcatagagtgaacagtgatgacctctttcctgtatcagtctttgtcttattttttgtatgtgtgtcttttttttctgacacttggtgagttttgtatttttgtcttaggggttaactttatttatttatttattttattttattttattttattttattttattttattttttgagatggagtttcactcttatcacccaggctggagtgcagtggtgcaatctcggctcactgcaacctccgcctcacgggttcaagtgattctcttgcctcattctcctgagtagctgggattacaggcgcccaccaccatgcctagctaatttttgtatttttagtagagatggggtttcaccacattggccaggctggtctcaaactcctgacctcaggtgatctgcccgcctcagcctcccaaagtgttgggattaccggcgtgagccaccgcacctggcctaggggttaactttataagtataatggcatataataattttagtgttctattcgttaaccagcatgtattcgatccctataacgggtgatgatatctcttttctctctttttccaacacaaagttttggtggacatcatcttttaaatgattaaatttgcttatgtttctcttatatgatttgccagctttaaatgataactcttggcactcagctattacatataaggcagtcagtgaacttagcatctcaatttcctttccctcttccactatccactcttattcatggtgtcattctatataagttgtatctcactttattgtgctttgctttattgtgctttgaagatgttgagttttttttttttaaacaaatttaaggtgtatggcaatcccgcattgaacaagtctattggtgccatttttccaacgtcgtgtgctccactctgtgtctctgccacattttggtaattttcacaatagtttcaacctttttcatttttgattatatctgttaaggagatctgtggtcagtgatctttgatgtcatgattgtcattgttttggggtgccaccaaccatgccctttgaagatggtgaacctaatcaataaatgccgtgtgttctgactgttccaccagctggccattcaggcatcccagatccctgaggcacaatggtattgaaatttggccaattaataaccctgcagtggcttctcagtgttcaagtgaaaggaagagtcagttgcatgtctctcattttaaatgtaaatctagaaataattaagattggtgaggaaggcattttgaactctgaaacaggccaacagctaagtctcttctgccaaacagttagcaaagttgtgagtgcaaaggaaattttgtgttttattttttttgagacaggatctctctgtgtcacccacgcaggagtgcagtggtgtgatcatggttcactgcagccttgattcctgggctcaagggatcctcccacctcagccccctaagtagctcagactactagtgtgcatcaccattcctggctaattttttaaacatttttttctagagatggggtttcactatgttacccaggctggtcttgaacttctgggcccaagtgatccacccaccttggcctcccaaagtgctggaattacaggcatgagccactgttcctggccaggaaaaattcctgaaagaaattaaaagtgatactccagtgagtgagcacatgaatgataagaaagtgaaccagccttattgctgatatggagaaaattgtagtggtctggatagaagatcaaaccagccacaacattcccttaagccaaaatctaattcagagcaagcgggctcttttcagttctataaaggctaagagaggtaaggaggcttcagaagaaaagtttgaagctagcagaggttggtttatgacatttaaggtaagaagaccttttgataacataaaagtgcaggttaaagtggcaagtgctagtggagaagctacagcaaattatccagaaggtctagctaagaaagtggctacactaaacaacagattttcattatagacaaaacagccttatattacaagatgccatctaggactttcatagttacagaagagaagtcaatgcctggcttcaaagcttcaaatgataggctgactcttttgttaggggctatgcagctggtgactttatgttgaagccagtgctcatttaccatccagaaaatcctaaggcccttaaggattctgcttgccttctataaatggaacttcaaagcctggatgacagcacatctgtttacagcatggtttactgaagagtttaacctcactgttgagatctactactcagaaaaaagattcctttcaaaatagttctgttcactgacaatgcacctagtcacccgagagctctgatggaaaggtgcaaggagataaatgttgttttcatgcttgctaataccacatccattcttcagcccatggatggagtaattttgactttgaactcttattatttaagaaatacatttcataaggctgtagctgccatacataatgattcctctgatgagtctgagcaaagtgatttgaacatcttctggaaaggagtcatcattgtagatgccattaagaacatttgtgatgaattggaagaggtcaaaataccaacattaacaagagtttggaagaagttgattccaaggctcatggatgactttgagagcttcaagacttcactagaggatgccactgctgatgtgttggaattagaagtagagtgtgaagatgtgactgaaatgctgcatctcatgataaaacttgaatgaattaggagcttcttcttatggatgaacaaagaaagtgatttcttgagatggaatctgctcctgcctggtaaagatgctgtgaacattgttgaaatgacaacaaagaattcagaatattatatcaacttagttgataaagcagtggcagggtttgagaagattgattccaatttgaaaaaagttctactgtaggtaaaatgctatctaacagcattgcatgttacagagaaattgtgaaaggaagagtcaatggatgtggccaacttctttgttgtcttatttcaagaaattgtcacagccaccccagccttcaacagtcaccgccctgatcagtcagtagtcatcaacatcaaaggaagaccctccgccagcgaaagcattatgacttgttgaaaactcagattattattagaatttttggtaataaagtattttcaagttaaggagtatatatacattttttagacctaatgctattgtacactcaatagactgtagtagagtgtaaacataacttttatatgcactgggaaacaaaaaagaaaatgtgtgactcattttattgtggtggtctgaagtctaactcacaatgtctctgacgtatgcctgtataacctcagggtatgtaatttagattttaatttgttaccctgatatttgcatttgttttagtcgtagctctatagttagatatcattaatgttcatctctagtccttttgctgtggtttatctcatgatcacttacttggctgaaagtcatcttcaagtagttgccttaagaatggctcaggggagcaatattctgtgagatcttgcattgttcacagttgtagcttaacatttgaaggatagttgaaacaaaatgaaatccattttattgactcacattttctttttctttttttttttttgagactgggtcttgctctgttgtccaggctggagtacagtggtatgaacatagctcactgcagtctccaactcctgggcccaagtgatcttttggcttcagcctcctgagtagctgggactacaggcgcataccaccagggctagctaatttttaaaatattttgtagaagccaggtcttgctgtgttgcccagactggtctcagactcctggcctcaaaggatcctcctaccttggcctcccagagtgctaggattacatgtgtgagccaccacgcctggctttacattttctttttaactggtctcacaggtgttgctcttctgtttcccagtttttatgcagctgttgggggaaacctgatgccagcctttttttccccacttttataggtgactttatctttttgttcagtgacttaaaatattatttctctttcatctgataacattactaggttttgactcttttattgcattaaagttttcttgattgacatctttaaacattttctttgctgtgtggttttggttttgttctttgggagattacagctatacatatattgtaacttctttgctcatcttctatgtctctcatttctcttctactttttaactcttaaaatctagttttcattttgttaattttattctccctattcctttagtttgtatgttttccacaatgcctgtgctgccatgagctccttccaattttattttttgtttttgtgatcaatagggaattttttccttttcctgtttctttcctgaatttcatagctcacatttcatcttcacttgttgttccatttttccactgatttcttgaatttctactttttggcttctctgtgaagattcttagagatgattatttcatacttggtcacaatttttgtctgattttggaaacatttttctggtgagcctctttccatccattggtaagttttgctactcttttcacattttttttcttatggaagttttatatttatgctgggtcaacttctttttaaaatacctggccccaggcaaactggatattcctggaccagctttctgccaaatgatttcatggagttggggagaggagagcagggtgagtcagggtaccaccttccagacagcacatcctaactctcttcatttctgtgacagagtgtttctgcaaatagggtccttctgtattatttctgtcctacctccctgttttctgaaccagatcaagttcagggtggcttctgctgctctccctctttatcctatgtttcatgcttggtaaaaacagggacatctcttttgaagttcagagtgagaccctcccctttatacttggatattttcggatactttctgaaatttaccactttagggccctgtcatcattttctgagcttcttctttttattttttgttcatatggcttctgtccaatctccgcttcttttggtagttcttacacatatgctggaatctctggattatatccttcttccagctctgctgaaaatgagtttgaggattttctgcccacatacaattgtgaagtagcactgcaacaaaaatcttcattcagaagcaggagagacacccagcagtcactggtccacagcaatgagggacaggcattgagaggctcccccgccctcctggtgggggaaattccttcattcaaacttgtttatactctctaggaggaactccctgccttattgctctctgaagcccagctatgccttttgagaggttctttcctctgaggcacagttttgacaatcaacttcctataggcgcaaatttcagaggctaacgattggtttagcggcacaggtttttgcttttgttttaagatctagccttcaggacctatgttgtttctaggtgaaatccagaaagtcatatgcaacaagaacattttggatgaaggaaaattgccattgttatttagaaacactcttaatctaattatatgacatgctaggtttacacttgcaaatctgcaaatatattggtgttagctattaaaagtattcaagatgcccatgacaccagtgggtctggggcttagaagccttttctggcactctaggccaggttaggtcagcttaatccacagactcacagcgtccaacaaaggaagctgggtggcctgacaccatttagtatacgggcaaaaagtgttagcaacctgaacaacaccagagggcgttgctgtagtggatccaagaagaccaatgtcaggtttcattgtgttcagcagattgttaacctgggaaaaagtgtcacgcattgtaggaggatctattgtacaccaattaaaattgagaaagtctgggccacttcaagaagtacattttggaaaatgctctctgatacccggtattggattcatgagacattagtgtgtatattgaaggaaactcctaattttcttgtttcatgacatggctaaatgaatgatctgtctgctgcattgaaaaacactatggctacattggaaggtgcattaatggtatttattgtgttagcttgttaggaatccaggaacttggtttattgaacaactatgtttattgatccacataatattatgtgactgaggaatggtggctccatctgcctaatgaagaacgtttgatatgcgatggtttttgcccttttttgtgtgtgtgcttacaccggaatctttgagtttgagcaaatggctcttagcccttggattctgttgcctggattccattcacttactcacccatgtcctcattgtcatatccccagtggttcccttccccatgctttgtccccaggcctcaggtgaacaatcaccttgtctagactaagaaatccagtgcttggccacaattattagttcaaagatggacatatgatctggattaggggcttttgccggagctttggaggaaatgacctctctttcttactaaaggtaagtctggaaagagacaggcctaaggcactgccagtcatttttttccccttgggttgttctgcctagaattcatcaaacactaaagaagcagagtgaagaaaaggagtggtgaatggggtcttgtttacatcatttgagctctggatggtgctacccaggaagtgttaagaaataaatgttaaacccccttctatttactggggtcaatatattttctttcgttgtttaagcgagtgtgcgttgagctttctattacctgcaagtgagaacatcccaatacatgctttgggtcagagctcatgcagggccagtgaatatcctctgacctccacagctagtgactgagcctgctggctgctgcagctgccatctgtcatcatctttgagccactgactcttgatttaaagtcttaggcagagccatcctatttgttcatgtgcacacatcctggctgcctaggagctgtttcctctgtggtgggaggcaggacactgtgtcataccaattatgcacaggaaggggggctttcccaaaaatcagaaggaaggtggatgctgaacaggaaactactgcaaaacaaatgtgcatcaaaaccaaaagtaaaatgcaaagtccacttcagtatcattgtacagtgttaacactagagatagggtccttgttctatttaatttagaaaacacaattttctctctcactctttctttcttttaattgaaaaataatgtattgtaagttgagcaccatttagctggctaaattttaactccagagtggaggatctttatagagtcatacagttagagaattccaaagaagcccttaatacaatgtaagtaagaataatgaggtgcagaaataattgtttttccagttacttagtggtaaattcatttgttgcatgtggtcgcaaggtttataagaaaactcagagcccagcaattcttccagttcttcctgagcaattttccactagttaggagtcaggaaagaggaaccgtgagagctgaggagctgtgtatttcattaattgtgaaatacacaaatattggcctgttcccttgcgatcataaaatttgcaacgtaatattgcagacatttttgcatattactaaagttctttgaaaagtgtattctttgatggtttctattggatccactattcacactataatcacatattcctgggaacttaagctgtttctattttagtaataatgtaacaccatggtgttaacgttgtgaagtgtggtcttcatctctggttgttgccttggaaaggttaccaagggtttgctctgtcaaaggaaatgaaaggcttgccaaatttctttccagaaaggctctcatgagcagcttaaggttatgtacttttcagacataaaaaatgtgtttattaggtagaatgtgtatagacacactttgtgaataatagaatcttttctgaaaagcagcgctactccttagtatcagagatcccttttatctgaggatatcaaagcacttctttttgaagaaggtttttcttgtgctgagatatatggaaagatttacaagtgtatagcaaacggaataccttcaggcacttctccagaccagtagccacgccagaaggaagagcagactctgctctgtcaatgacagggctgcactgcaccctagtccctttctcagtaactaattcaacgtgagaaagtcccacctgcctttgattattggctcagctggtgggtcccccgtaactagcttttctaagctggatgaatgatgctcacttctatgtgcagatgctttttcacaagctgtcatttgtagaaggacagcgagcgatcaggttcttaccaatatctgtgaaatgcgattagattttagtctgtgaggcattttcagattgagccacctgactctgcccacatcagagagagagcctctggtcaggaccaggtggtagccagtcactgcgtcactagcctggcagcctcatttaagggttgtccctatcaaactatcgaggcacctgttggtacttacccagcactggattggatgtttattttttatttttatttttatttttcagagaaggggtattgctttgttgcctgggctggagtgcagtggtgtgatcatagcttactgtaacctcaaactcctagctcaaatggtcctcgcgcctcagccaaccaagtagctggaactatagttgtgcaccaccatgccgggctaattaaaaaaattttttttttgtagagacaagggctcacaatattgttcaggctggtctcaaattcctggcctcaagtgatcctcccaccttggcctcccaaagtgctgagattatgagtgtgagccccacttgatttagatgggatgtttaacctgtgcctttgaaaagagcaatcaccatggctaacatttactgagttcttactagttaacgtgcattgtgctccacatacattatctcatttaatcctgcataaccacatgaggtgggtactgttattagcctcattttatctatgagaagactgaggcccagagaagttaaataacttgcccggtatttcatagttagtaagcagtggagtccagctagattcaccaggaccagctacataatttgtggcacccagtacaaattgaagtggggtcccttagagcattaaaccaagcacaggacccatctaagcgtgggccctgtgggactgcacagggtgcacatccataaagcagccctgcctgcgcagacagactggtgaccataataagaaagcacactctcaactaaacaagtagggctgcacaacacacagttgggccaagatttgactttggcacgtaaacagcaagtggaagcctttgtgtgcactcctcaggcacaagtcctctttaaatgccagctttctcttcctgaaaaacggggaactcttttctagccagaggtgaacagatctgagctcatcctggtgctgtgcgttcattacagcctccccttggctgtttgcccttgtggagttggttgtcttctgctgaaagtcaccacctgatgctgtgggtgctatgggagaacagtgaagtttctggagggaagataggaatcaaccgcctgttttctcctgggactgagttttcctggagacatattgctcagaaacaattccttcccacagtaaagcacaaggcaaacggggtgcttagtttgcatcatatttcacaggtatttaatcttcacatgtaactcttgctttgcatgtaactcatttaatctttaatagctatgggtaggcactttaatagccttgtcttttgatgaagaaagtgagggagagagattaagaatgtgcctatgacctgagagttggtaaatagaagaatcagaacagaaatctgtgtagtctctagttctagagcctacagacaactgtcacaccttacttcaaagttctacccaagcattctagaaggatgagcagggcagtcagagaggcggggtgtaactagatccccaaatccagaaatgtggtcttcccattgcctcagagcaaagctccaaagtgtaagtgctggaattttcccagagtgacagtgttgagggtcaaacagtctctccttatagttcaccaaaggcatggagcacaaatacactcacacacacgcccatgcatgagatacagcatcactcaagaatgatgactttctgtccactgggcagtgtgtcaccaaagaaagatggctgtgaatatatttaaaggcttgtttgagtattgcatcactcatgctcttacccaagaacttagctttaatattatttttgtgttctagtcaacaaaacactgaacaaataaggaaccaattgtgataataataataataataatactttgcattggtacagtactttacagtccattgatttttttctccctgcattttccttgagtacctctgacactaggatttgcagatgttaagtgggtctaaggagaaccaggtagtgtgaggtggaatttgatccagatctttcatctcctcacttctccctgatgctccgtggtaagccacagtgccttacccaggaggtgggtgggggtggtcatctctgaaagctggaggaagggggtgtagcacttgtcaggattaatgagatgcctgttcatccagttccaagcctccacttgtttgcctatgtctgcaatatatttctttctgagacacttggacaacctatattccccaaagttaggctattgtgagacagtcaagctggggtcttcagtgttttcacaagttacttgaatgtttccaagagtcaccataaacctgcataaagtgaaactgtagaggctcatttatttctttttcaatagggctagcttaatgtcagcttgaccattctagaggggtattcttggaaaaatgattttgtccaagttcctgaaagtacctgaaaaaagttctgagagcttttttgcatatttaaatcaaaatcctggtgagtaaaggaaatacaagatgaggaagcctagcctgaacactcattttagaaatggaagctgtaatttagattattataagaggtttgaatgattcagaacagaagattgcaaaagaaagtatccaggtgactcattcccgaaggcagaaggcaaccgtgagttctgcaggcctgtgggtggctgaatgatggactaaccatcaacgtttttttatcatgttgcattcccaacctgtcaataaccatggacccaataactcactcattgaatggattcagaaacaggccccacatgatttacccagatttgggagaatggttagattactgtctagatactttttaacataagattgtaatatcaattggcacaaaaatgaatattaattaatttagactttcatctccatataaagtgtgctaatgctataggactttttcttccagcaatactttctttagcctcatccatatagggtaagcccagtactcattgtacataagttacttatgtaatggcagtactcttaagattgctgcgggtattttcaaagcactatttgaaatacatattagtagacctgactataaaaagattctcttgtattcaaacatccatcaataaacttttagcatcttattaccctcaatgcaagaggtagttgggcggagaggtaggactcagagatgatgtggagttcccagtaaagagaaaaaaaccagatggggcgaaacttcactggcggtggggagagacagcacaaagccttcccttccctattctttcctgtttttagacttcccagggtaaggctgtacaattcatgagtcctttctaaccttgtactagaccacatttcctctttaatatggggtacccattacccttcaagacagccacagtcggtccaggtggagcccatgggtaagactgtgaaaaagaagctcttgtcaaatctaataagtgcagtggtgattccttcccacgcattcaggtctcgctaaactagacatgcccatgatgcttggtgtttcagaaaaaggtggtatcactttttgtcagaaatgaaaatgaaagttctgagtgaccatgaatttcctaaaatgtgttaatatccaagaaaccttaaaaccgtttataaggggagaaggaagagaagcaatggaacaatgttgcgaattgtagagggcctttgaaatgaagttctactccctgaagctcataaggtgggggaatgtacaaacttttaaaaaagtctgtgagttctttggtcagtatgctaatttctctgccactctccctctttttcatatttctcaccagggtatgggaatattgctccgagcactgaaggaggcaaaatcttttgtattttatatgccatctttggaattccactctttggtttcttattggctggaattggagaccaacttggaaccatctttgggaaaagcattgcaagagtggagaaggtctttcgagtgagtactgtgtcatatttaaattctaaccactgtgatccagttggctttagcctgacaggatccaggaggcagtatcaggggcattgtctgcttttaatggaataattttaatgttatgattgtattttctgttttggccaatggaagtcaaacatcttgcacctaaactcccttctttgagtagcttcctattttagagtgatatttctgcaatcacaacacaagagggttaagtatggatttgccaacacagattttttgaagaggtgagacaagttcagtttctccttcaagatggaagatggggttcctcattgtgtttgtaatgatgtagaaaactgtaaatccatccattttgttgttggaactcccttactccgttttattttcaagcacagtgtctttaggctaatcctgcttcttccagaagcctgacttctccagacactgctctgtgctttgcacctgtctcctaatggtctctctctctcccatctctcactgctgagtgctccctcagaaatggcatcctgatgtactacttcctactgaactgttgatgattgctattgccttagtgggttttttcctttctggaatatttatctttaaacaagagacaactatctcaactcaaggaatttatttactaaaattaaaattaattaataaattattcctggcattagttgcaggcatgagtggctgagtgattaaaccggggttcccaatgccctttaactcgcactcatttgtatgctttcacagaacacctgttttgctcagatgtaaggtcacttctgccctcttactcaccgctgacctaattctcaagtctttcaaaccttcctcagggaatgctttcttatgatgacttaatatttacaaatgacattctgaggtcttttccaggatctaggaatggtggccaaaggcagatcagctggaagctctaaagctgtgcttttttccccctctaagaactcttaaactttgagttcaaggctgtctctgcaataatggctcatacttctctttagaagaatgcaagggagctttcagatgagcagtttcagaggctttttaaaaagagtagaatgggaggaacgaggcaccatagctgggtgagccattttataatctcactgatcctgggtcagctgcctcagtttactcatccacaaaaggggatagaatttgaatctactttgtcaggttttggtgatgattaaatgaaatgatgtgtggaaaagagcttgtcatatagggcagacatatagagcccagggcttctgtgtttctctccaagagaagccctcatgggcaggctagccactcatccgggtttcatctgaggagctctgtggtgtgtgagttttactggaatgtcccacagcctttgctccttcatgctggctggccggtggcctcattagaccgtgcacctgggctccccagtagtctccatggaaaccatcagtgctcagcttccctgcttttcagatgtttagttcttcctaaaccagacatagcagccctgtctccaagaactcttttgaacttcttggaagcacccttttagctgctgcctcatggccctctgacttagagaaaaaagaatctggtagtttgaacactcagaacaggattcaattggggaaatgactgatctggcatttttatttttatgtagcttctttagagctcagtttccttatttgtagaagaaaggattggactaaaagtttttgaaatcctccttagcagaaaaaattctagttactatatttgaagtgatggaagaggttgcaatcatctggacatctgctactaaatttagggacttagtctcccctaatgaatttccgactacaaatagagtatatggttctccttccccttgaagctgcgtctcaaatggaccatcaacagattctgatacagagccttagaaacctcacatttcatctttatgctgattgtccactcagctccttgcagcaccatcaaagatcaagattcttttaggaaggcgagacagttgcatattattgaattggcagtgcacaatgaatgcatttgctgagtattggagggtgctattggaaagggtgaccgaattccagggggaatgtaagcacacttcctaaatatacgaacaactgatcctgcagcagtttgcttgctgcatgtaaagttttggtagaaaatctcagttttctgccattgatttaaactacatttaaaagtccaattacgtttaggtggttatttgagaaatgaaaattgtataagctaacaaagcttggggttgtgaatttttagttctcatgggggaaggtttatgtatttcttctgctcaatgagtgttaagcccttctcttgatctgttatgttttctctcagctcttgggaagagaggatttacggtggagtaaaaataaaatctaaagttggctttctgccgggcatggtggctcacacctgtaatcctagcagtttgggaggctgaggtgggtggatcacctgaggtcagaagttcaagaccatcctggccaagatggtgaaaccctgtcagtactaaaaatacaaaaatttgcagggcacggtggtgcatgcctgtaatcccagctacttgggaggcggaggcattagaattgcttgaacccaggaggtggaggttgcagtgagttgagatcgtgccactgcactccaacctgggtgacagggtgagcccctgtattaatcaatcaatcaataaataaagtaaatataaagttggtcttcaagatgcctgaatcctgaggtgaccctgttttgggtccttccaacacatcccaggtctgatcctcattttaaagaattgctgagggatattggattacttagaaatgcttttggttgcagaataataaaatgcctgactattggagtttttatgacatgaataaataagaattcttctcctctggagttcagaactaactgtgaaatggaggagtcagatggagatcaaattgccagctttattgcttataagctgatcagagaatatagctttagctttgtttccgaaagggcttacagtcactttaccctgaattaggaccttgctgctgcattagtttttctattgctgtgtaacatatgactacaatcatagaagcttaaaacaacacttttaaatggccttcttgcaccaccacttaaaatgtttaattttgctctcagatgatgttcagaaacaaaggaaaggtaaaagtaaaggtgccaaattatttgcagatgtgcataaccaaacccaaatgaaactaaaataagaatgctcacaattttctttttttttttttttaagtggagatgggatttcactgtgttggcaaggctagtctggaactcctggcctcaggtgatctgccctccttggcctcccagagtgctgggattacaggcgtgagccaccacgcccagccacacacatttttttaagccgggtgtacagaccaaataacatattaaactagatgtaaagaaagaaccaaaagtgaattcaccagaaaagacatgccactaagacagaatgtaaattctgtagaaaccagagtactcaatgcagaaggatacttttctaccagaaagtgcttgccaacaaacaaacaaacaaaaacgccttttacagacccaagagggatgcaaagttctttacttaaggcaccttttagccaaatcaaatcacatataaagtcaaaaagaactcgccaaagggagggagtctgagaatctgagaggagagtcacccagacagaagaggcaacagacagaagcagagagcagaaagggctcagtcagtactgcactcagttccagggacctctcattcctctgaggtgcactcactttgatcccacttctgacaccatttatgtcaccctaaataacatacagacagaggctcattgaaagaaaatgatatttactcagggatgggcattgcagtggtaacatacatgccagtttaaactatgtgtgcattcagggaggtaaagcaaaaaaaaaaaaaaaaggtttttaaaggaaaaatgaacaggattacataattgttttgagctaattatccttgaatacaaggatcaataacaagggtgatgccagtccaaggttggacagtcagttgctgggtagatgtcttcgcagaaatgcttttctgcataacgaggtgatgggttttgtgcaaggttgtagtttttgcagtcttttatgatagctcttgtaatcaggcatttgtgcatgagaatccttccttcctggctttccctgactctgtttgtcagagttttaagcacaagtaaccccattttgattctgacaattttcatactcccaacactcattaacaatgggttaagaatttgaacccttatctcacatagcaagaagcctggaggtacgttgactcaggcttgtgctatcagctccacaatgtcaggtgtatccagatttgttacctctttctgctctgttttccttggcatggtagctcttcatcctcagacttgtcactcacattgcaagatggctgcttcatgaccaaatagcacgttttcacccaacctcatatcaggaaatacaaaaggaactcccttaaaatttatctttttttagagcagttgcatattcacagcaaaatggaggggaagatacagagatatcccatatccccttgcccctacacacatgtgcagtctccctcattatcaacatcccgcaccagactggtacatttgttacaatttatgaacctacattgatgcatcattatcacctagagtccatagtttacattagggttcactcttggtgttgtagagtctatgaatttggacaaatttataatgacatgcgtctaccattatagtatcatacatagtatttcactctcctaaaaatcctctgtaccctgcttgttcatcaatcccgttctcctaacctttgacaatgactcatgtttttattagttttgtcttttccagaatgtcattaatatggtttggctgtgtccccacccaaatctcaacttatatctcccagaattcccatgtgttgtgggagggacccagggggaggtagttgaatcatgggggccagtctttcctgtgctattctcatgatagtgaataagcctcacgagatttgataggcttatcaggggtttctgcttttgcttcttcctcatttttctcttgctgccaccatgtaagaaatacctttcacctcccaccatgactctgaggcctccccagccatgtggaactgtaagtccaattaagcctctttttgttcccagtttcagatatgtctttatcagcagcgtgaaaacggacttatacagttgtgtagttgcaatcatactgtatgtagccttttcagactggcttatttcacttaaatatggataaaagtttcctctatgtcttttcatggcttgtagtccatttctgctgggtggtgaataatattccattttctgggtgtaccatagtttatgtatccattcacctactgaaggacatcttgtttgcttctaagttttggtaattacgaataaagctgatataaacctctgtgcacaggttttttggttgaacattagttttcaactcctttagttaaatacaaagatgtgtgatgactggattggatggtaagaatatgcttaggtgtataagaaattgccacactgtcttccaaagtggctatacaattttgtacttccaccagcaatgaatgacagttcctgttgctccacatcctcatcagcatttgctgttgtcggtgttctgaattttctcaattctaagtgtgtagtggtatcttgctttaatttgcatttctctgatgatgtataatgtggagcatcttttcagatgcttacttgccatctgtatatcttctttggtgaagtgtctgttaaagtctttggcctattttttaattgagctatttgtttctttattgttgagatttaatgtataatgtgtaatgtattattattattattattattattattgagacagagtctcactctgtcacccaggctggagtgcagtggtatgatcttggctcactgcaacctctgcctcccaggttcaagtgattcttctgcctcagcctcccaagtagctgggattacaggcatgcaccaccatgcctggctaatttttgtatttttagtagagatggggtttcactttgttggccaagctggtcttgaactcctgacctcaggtgatccacctgcctcggtctcccagagtgctgggattacaggcatgagccactgtgcctggccatattttatatattttgaattatattcctttatcaagtatatcctttgcattttttatctagtatatcctttgcaaatattttctcccaatctgtgggttatcttttcattctcttgatagtgtctttaacagagcagaggttttaattttaatgaagtccagcttatcaactatttctttcatggagcatgtgtttgttgtatctaaaaagtaattggcatactcaaggtcatgtagatttcttcctatgttaccttctaggagttttatacttttgcattttacatgtaggtatgtgatcacttttaagttgatttttgtgaagggtgtgagctttgtgtctgcagccatattttttgcatgtgtatgttcagttgttcctgtgccatttgttgaaaagacctttttttttttctccatgttgtcgcctttgctcctttgtcaaaggtaagttgactatatttatgtggttctattttgggctctctattctagttcattgacctatttgtctattctttctccaatatcatactgtcttgattactttcgctctatagtaatttttttttttttttttttttttttttttttttttttttgagacggagtctcgctctgtcgcccaggctggagtgcagtggcacgatctcggctcactgcaagctccgcctcccgggttcacgccattctcctgcctcagcctcccaagtagctgggactacaggcgcccgccactacgcccggctaattttttgtatttttagtagagacggggtttcaccgttttagccgggatggtctcgatcttctgacctcgtgatccgcccgcctcggcctcccaaagtgctgggattacaggcgtgagccaccgcgcccggccacgctctatagtaattcttaaagccagttagtgtcagtcctccaatttttttcttctttttcaatattgtgttgacatcagctccttttatggaagaaaaatctttcccagaagttaccctgtagatttccccttctgtctcattgaccagaatgagatcacattagcatctgcaagggaggataggaaaggaagtatcggacaaaggacgatagtattgccataatggaccagtgattctcaaagtttggtccctcaaccttaggcatcagtatcccttggaccatcggcatcggcatccactggaaacttgttagaaatgaaaattatttgtggtcgtggtgggggcggtggggctggagctcagcaatctgtgtttaccaagctgtccaagtgattccaatgcttaaggagcagaggaatcatgtttcatctcttggggctgaacacattgctgtgatgaacaaaattagaattctgttagcgaagaagttggagtaagcaaatgataacgtctcacatagatgtcaattaactgctagccactgagatcactcatagagaagatgtcttcactcttccttgtcataaattaggtggctgttgggatccttgaatcaatcaagataagctagcctatcacaaacagcctactcccactcctgccagatctgctgcaacccaggcagcttctcaggctcaggggctagatagggtgggggaaacagctgagcgctgcttgctggctcttcagagcgttgtccctcaggtagagcccattggcccgagctagttaccaggtcccattcgtagctgcaaagggggtttggaatgcattcttttatctccaagaatagtagtggatggtaaaattgttgcgcactggtatagtcatgttcatatgctctaagatgcactcctgggtcccactctagggtgaccagcctttcaggaatttagttccaggtcgtttgtgcatcactcttcggggggaatactactattgtgagactcatagatttcacacctgagaaaatggagcctgtgaggtgacttgcctggatccacacagtgaattggtggtaggacctggattagaaccactaatcctgccttaacctcttccagatgggctgaaaatattaatgtcagattaatctacaccatgaaaccaatgtggagtttagaatattttagtataccatactaattaaagtaaaaataattcttcctgagttcccagggaaatatctgggcagttagcatcccaaatatctgcttatttgggatgaaggagggctgacattggattctgaagcaggttttggaagcaggcggcctctttctcccctgctgtggggtagctgtcttgctgggccaggctgattatcacttgataggatgctgtaggaaaaccagtcaaattctggactgattctcattttcttggctccaagctggactttggcctctggtaggaagtacctgcttctttttttccggctcggatcagcaggctttctggtatttcctgtaaaaccaagggacacctttttttttttttctttttctttttttggctttccccccgccccaaggatatggcagaaatgtttatttgcttatggatccaaatgattctgggtgtcactgacaaataataaaacattaccctagacttacgagtgccaaaattacttggaaaatttagaacaggccacatgtttaagatggaagtgatgacaatctcaaagtgctaatacggttaaattagtggactgatcaaccactttagattccaggaaggggcatgtggcggaagccaaagactcctgcaggcctctgccatgtgcctggcatggatcaaggagaggcttttaagaacacaattggcaggaagcttctgtttctcccaaggcatctttgagctagcattcagcagcaaaagggttaacttaaaataattactatttcaagaggcaggcgcagtggtccacgtctgtaatcacagctctttgggaggccaagacagaaggattacttgagcccgggagttcaagaccagcctgggcaacatagtgagaccccatctctgaaaaaaaaaagaaaatcgagccgggcgtggtggctcatgcctgtaatcccagcactttgggaggcagaggcaggcagatcacttgaggtcagcagtttgagaccagcctggccaacatgatgaaaccctgttcctactaaaaatacaaaaattagcctggcatggtggtgtgtgcttatagttctagctactcgggaggctgaggcaggagaatcacttgaaccggggaggcagaggttgcagtgagctgagattgtgtcactgcactccagcctgggtgacagagtgaaactctgtctcaaaaaaaaaaagattcaaattacttgggtgaggtggtaagtgcctatagtcctagacactcaggaggctgaggaatgaggattgcttgagtctaggaggttgacactgcagtaagctaggatcacatcactgtactctagtttgggcaacagaatgaggccctgtctctaaaaatatttttaagtaaaataaaaaaataaaaattattatttcaaacagatcaaaatccctgttttggaaactgggtattattttcagcattgtaggttcagctacagtttccaatacctattggtaatgaaaatgttcaagggtcttggctgtgcacatcagcattgcacccaaagaggcaggggaggagggcagagtggtaggctgtggctttagtttaagaaatggctgcctttcagtagtgtagaaaagacacaatatcagtgaacttcagtttaccagtgcccatatgtctctggagtatctgcttctatgtcatgcctgccctagtacataccatattataagttcctaacaactaactcagtaggattaatgttacataataatgtgagtttatttatttatttattgagacggagtctcactctgttgcccaggctggagggcagtagcatgatctcgcctcactgcaacctccgcctcttgggttcaagcgactctcctgcctcagcctcctgagtagctgcggctacaggcgcgtgccaccatgcctggctaatttttgtatatttttagtagagacgaggtttcaccatattggccaggctggtctcgaactccttacctcgtgatctgcccaccttggcctcccaaactgccgggattacaggcatgagccaccacgccctgccgtgagtttatttttatcagagagaaggccctggttttaatgtaaacaattgctttcttccttttcctaggcggcaagaaggtaggaagtaattatttgaaaatgcaaataattttaaagctttatcaatcaagtctgttccaaattagtttaaggattttctgtagctttaatgatagggccagaatgtacatttggggtgacctacatatatgacatccacaaaacagactacacaacatttcttaatgacagtccatgacagtttttccatggacggctccttctttcctcccttcatttaacataggattgctcagcctcgatactattgacattttggtctggataattctttgtcataggagttgtcctgtgaattgtgagatgtgtagcagcatccctgggcctctactcgcttgatgccagcatcatcactgcccgcagttatgacagccaaaatgtctccagacattactaaatgtgtcctcaggggcaaaatcgccctagttaatttgaccatagctatactgggatataaggggacaattgccccaaagactaccaggtgcatgccctggtcccctgtccaaatcttccacacgagctctggtgcctccaccaatgatcctaatcagtttttcagtgctagcgccattccgactcagaactctcctccttcagatgggtccttaaagagggctttgcagattttatactccgggaatgagatcatttctcaccaagaaagcaaaaatgcctggagacttgactctgatgagtacacataatgacaaattgttctgctattattcttcactaggcaaaccatctcagcactaactttaactgacccatagggacttatctaatgtatggttcttctttcttggcttacctttcataactggccagtatccctttggtgtttcctgttgtcttctgaggtcattatagaacgttttaatggcctttaaagtgcatcttcactcttttctatgcacagtaaagatatcaaacattgcctaaaatagaactacttaaaatactgcctggatagcgtttatcatttaaacattttccaggtagctttaacagagtctctctctgtctctctgtctctctctctctcttttccccccggcaagctttgatcacaggtaacttctgggaatctgattgttactttggggtgggaagttattcatgaacatctgcatgccagaacctttgtagggagccttggatcggtcatttgtctgagaggattttgttgagataatactgagtattatggcactgtgataccaaagcctagatataagtcactgatatggtttggctgtgtccccacacaaatctcatctgaactgtagttcccataatcctcatgtgttgtgggagggacccagtgggaggtaattgaatcatgggggagattattcccatgctgctcttgtgatagtgagttctcatgagacctgatggttttataaggggctttaacccctttgcttgacactcgttctctctcctgccatcctgtgaataggtgccttccaccatgattgtaagtttcctgaggcttcctcggccatgcggaactgtgagtcaattaaaccccttttctttataaattacccagtctcgagtatttcttcatagcagtgtgagaatggactaatagagtcgctaatctgttttgagggtttattatgccagatactgggctatctgggctttacctagagtaagctgtacagtaagttaccctgccaaagagatcattattgtttcttaattatatgagtttggaatgcttagactggttctgtgacttgtccaaggtcacacagcccataaatgacagaactagacttccaaacttggtctccctgccccagagtgcatgaatagacttagtcattccactatatgccctttcttctttctcttgcaatgtaggcatagcatctgatggctcagaggagccttcacaaaaggtttagtaagacctggggacagataaaaatggctagttgagagaaagatattgggcctgtcttcatctgctttaaaaggattttagttttctgacttcatgctctctctcagtgtgttgaattgcatcatagcctctggttctttatgtatctgctttagttccctaataccagctcattattagttaatatctctttctttgtgttctcttttcttggaggttaatctaagatttaggtgtccccttgctcatgtctgctgctatgtgactaatacaaagatgggtttatattctggtatcactataggacattaaaagtaatgtcaaaaaccacaattacttttgtaccaacctaataaaagaggggcctatactgtaccaatagctgacttgttttgacccacctctgcgagagcagttgccaggcaaagatagtccccactctgttcttccatccactgctctactttgtacaacctgcttaatgttaaaaacaggaggaaatgcacagctcaaagccaagcctcttggtgccctgagatagctggccttgtcctccaaagcattcttctttttctgggctcatcagaatgcctcaatgctctgcttcgatggttttaagagcatagagtggcttggtgtggtgactcaagcctgtaatcccagcactttgggaggctgaggtgggcggatcacctgaggtcaggagttcaagaccagcctgatcaacatggagaaaccccatctctactaaaaatacaaaattagccaggtgtggtggtgcatgcctgtaatcccagctacttgggaggctgaggcaggagaatcacttgaacctgggaggcggaggttgcagtgagccaagatcacaccactgcactccagcctgggcaacacgagtgaaactctgtctcaataataataataataataataataataataataaagtaaaataaaaagagcatagagtttgagaccatcaccaccaagattttaattcccactggggatttaactcagtcctaaactcaaggtctgctatgtcaagtagtattaaatatctcttccttttaagagccattttagctctttcctcatatctttcagatttggctggttttccctaaggcttctgaaactcttaaaacatctctgatagaggaaactatctagaaaattttatgggtattcattatcagtgaggtctttctcattgaagagataatcacttcttagaatcccaggggtttcattaagtattaataaaaggttttatatttttgcattttggggctagtgaaagtctagtgatgctttaggtctacaacatggtaaactgtatttaaagattccaggtgcttttgagttatgaatttaatgcaagaattctattagcaatcacatttttactagtattataaaatcagcataataggtgaatgatttcctatgttcatgctttatcaccaattttcacaggttagtttggttcctctggaatgcactgatttaataaaatattaattctttgctctcttcttatagagaactttttaaaaaattatcgtaattttttttttctttttacatttagcctcatgttacttctgtgagccaagcaagcaatgacctactttggtgtagcttctaacaaattaggttcctgaaaattgagaggtgcccttattgaattgagtgtgctcatcacggagctgggtgtgtgatctatgtgttcactgtaggataagttttagatgactggcatgtcagtagtcattgatactttctagatagctttatgactttttgccttagggaagggaaaatgtttagaatacacatcattattgaaaggtgtgccagtgttctgaaccatcacaccccaaagagccagctcccctgggaggtgacagtgtgacaagcatgtgcagccccatgctgagcaggctctgatggctttgcatagtgaagggctgccaacaaactgcactctcctgaactgaatccagcccaggaaatgtgcattcctgttagaagtgcactttgtatttctgggggagaatgcattgctttgtattttctgagaggagctgcatttgtgcatcataagttttgacctaatggttttgcactatgtcttggaagtttactgctgagttttaggctcctgctcatagatagctgtagttctcatcctataggtggtggacccctaggagcctgaggtgtcgttttaaaggatcagtgaatccttttgtgtttcaagcattgccagtggacagaataaacaatatgtctccttaacatgtgtgctgcccttttccaaatgtgtgtagaggggttgtcatcaatgattcatttcagttcattttaaagggtgactcccgaattcatagtatctatagtatcttttttttttctttttttgagatggagttttgctcttgttgcccaggctggagtgcaatggtgcgatcttggctcaccgcaacctctgcctcccgggttcaagtgattcttctgcctcagcctcctgtatcgctgggactacaggcatgtgtcaccatgcccagctaattctgtatttttagtagtgatggggtttctccatgttggtcaggctggtcttgaactcctgacctcaagtgatctgcccgccttggcctcccaaagtgtggggattataggcataagccaccatgcccggcctctctctttctctctctctctctctcgatatatatatatatatatatattctcactatcagttagtaccaaaagttctattgttgtgtggggatcaaggatatttttaaccttcagaagggagtgccatactcaaaagttgagatcactggtctttcaagttagcatcaatttccatgacattctgggctttcttttttctgtggatttaacattttcatcctggccatagtcattgttacaaagattttttttttttttttttgagatgaagtctagctctgttgccaggcttgactgcaatggcacgatctcggctcactgcaacctctgcctctcaggttcaagcaattctcctgcctcagcctcccaagtagctgggattacaggcacctgccactgcgcctggctaatttttgtatttttagtagagacggggtttcaccattttgtccaggctggtctcaaacttctgacctcatgatccacctgcctcggcctcccaaagcactgggattacagccgtgagccaccgcgcctggccagaagttttcttttcctctaagttactcccaggagttggtaggatactttagagcctgcttcaagattttctttatgcctttttttaattgtgttaaagtgtgcacaacataaaatttaccatcctgtttttaagtgtacagttcagtggcattaagtacattcacattgttgtgcaaccatcactaccatcatctccagaacttttccatcttcccaaatgacaactctgagtctgttcaataataactgctcatttcctctcccccagctcctggtgaccaccattctactttctgtgtctatgaatttcaccactccgggaacctcatgtcaatggagtcatatagtgtttgtccttttgtgtctggcctatttcacttagcacagtgtctttaaggcttcatgaatattgcacatgtgtcagaatttccttcctttcaaggctgagtaatatccccctgtctgtatataccacattttgcctatttgtttatctgttgatggacttttgggctgtttccactttttggttgttatgaataatgctgctatgaacatgggtgtataaacatctattcaagtccctgtttttaattattttggacatatacccagcagtggaattgctgagtcacatataattacagatttaatttttctgaggaaccgtgacactgttttctacagtggctgcaccatttcacattcccaccaacaatgcccagggattctgtctttccacttcctcaccaacacttgcttttttctgtttttttttttttttcctttaacttttataggcccaaatgacagcgtttggtaaattgctgtctgactgcctctaagtcctggctgctcccatagctgctgttctatcactctggggactaagtggagaggctgtgccgttagccttgcttccctcttgcaccttccctgtctccctccctgccctaacctacagctgtgtccctgtgagtctttccttcctactcgtcagcttgggccctgtgcgcagagctggtgggaggacgggtggctcagtgccaggccgactagggcctctgcatacggatgacatccagtttccaccagaccttttttctactctgaaatccttttattcacccaatcatgattcacttttctgttcttcactgtggctgttccttcatgctcctcgctaggtcaacttgataaacaattatcgaataacacttttttgtgtgtgttctcaacactatagggatatgtggcaataaacaagggatagtcctttctcttaaggagaaaacagccatgcatcaagaccagtgtccataatattgtgcagaatgataccagggctagggcaggcaggctctgaagtcacaccaccttgggtgaatgatccatgctatgtctacttcttatcagctatgtgacctcaggctgtgcctcagttttcttatttgaaaaaatgaggataataatggttcctgtctgttttggcacttagttgacacttgagagcagtgtctgccacatagcctcaatcaatgctattcactattattgtagaacactgttagctatgggagcccagagagggacttgttaagtctagcttgtatatttcacatcacacaagcacctgccttgtcttgccaatggattgttctgctcaagtaaagcataggggcttaaagctaaatgttactgtgcctttattggcctgtatccctgtaggacctgctcagtgctaagtgctttggaggtgttcagtaaatatttattgattgtgaattgattagagaggagagagacacgaaccaggtctttttccaagcacccaggatgtgtaagcttcacaaatgaagagatgcttgctgatgctgccctctgtcctacccttcctggaaatgggcatggaggtgggtggggctggagaagtggagggggccccagaaagggtagcgacagagagaaagaaacccatgggcaacagggtctgtatctgggacgggacctcagccatcaagcatggccttgggaggagaagatgcactggccgcgatgcagcgagccctttcgaaaggcaaacagcacaagcaagagtgcagacggcaggttcgtcggctcctctggggctcccccaggggatgccgttgccattcggtctgcgtgaaggaggcaggttgtcttcttcgtcgtcggccacacttcactggctgcaagtgttcacgcagatgtgctcatgtgatcttaccacatacgcagattctagtaaaaaaagaagaaaaaatccaagaatgagtgagaatttattttagctacatgctgactgcctctcagcttgcccgtgctcttaccagatcttgaaaacaagggccagtttgtatttttataaaaatgcatcaaagtgttactaaaagatcctaaaggaagactaaagtttcctccgaaaagaagcctggcccttcaaataccaacaagggatcctcggaagatgggttttactgagctcaaacactgtctcttctgtttagatactgtattattacatcatttcccctctcagattgagtgatgtttcctccattatttgttccgttccttggcagaagtgaatttcaccatgaacaacatctgcagtctttctatacgagcctggggaatgcttgaaagaactgatactaaattattattattaatatttgtttgtctacctatccactccccacccccaggtcccctctcactcccgagtagtcacaaatgggtgtatcgggcatctcgtctcagttgtcaggactgtcccttctcattctaaactattttgcagattagcttgagcaattagaatcaggaatagatatcatgtggttaaaataaaagggaatttatctacaatttgaaaatagattacagagaacttccatgtgattttttttaaaaaataaattttgctgtgtactataacagagttggcaccagagctaacaaaaaaaaagcaagtatcaacatttaaaatgcagtacatgacatgtaaatgccatatggtattcttgcaatgttattaccactttctttctggcatccttttcctgacattgctgtatgcttcttgactctgctgctcttcagaaagcctcaattgtcctgagccctttaattctgtatttatattaggtgtctctctcttttatctaccctttggaggcttatcaaccttttccccaaggaagaggaagaagaggacctgtacagatggctgtataaatatgtgacacctgcttccgtgagccactattggaagagtttaagagttgatggtattgtcccctgtctagaagatgagcacacatttgcttctcttctcctttctatttttaaaaaatgatcatgtgcctttaatgatgtttctagaaatgtcttgaattcaaattattttctatttttagggaaataaaaaaggaacccaccaaccaaattttctgaaaagattatatgggtcaaaatgttaaaagtttgtcatagttaatatttcctaaagtaagagccttggtgatcgtgtttggggagaaatctctgcttcaccacgggaatgtcagtggatctctgcgtttgcactgaatgtgccacattctttcatctccagacttttgcgtgtgatatttatggtgtttcaaacaatgtctgtaccctcctcctggtctcagctcaaatgtcagttccttggggagcttttcctgacttctaaatgaggtcaacaccccccccaaataacatcttgtagaccccaagaataacattcatctcactgtattgatggtgggcatccccatcagcctatgagttgtgtgaggtcgggtcccatctgcctgttcaccactgcatcttcaggtgctagcacatggcctggaacccagagagcacttaatccatacttgatgaatcaatgaatgaacattgctagacataaccttatacatcttgatatagaaaatgaccttgaagctggactaggtcccagttacttgagaggctgaggctggaggatcaggccagcttgggcagcatagtgagacatcccctatccctcctactctcctaatcctgcacaatccccctctaaaaaaagataaacagagtgaccttgggctggcgctgtggctcgcgcctgtaatcccagcactttgggaggctgaggcgggcggatcatgaggtcaggagatcgagaccatcctggctaacatggtgaaaccccgtctcctctaaaaaatacaagaaaattagccgggcgcgatggcgggcccctgtagtcccagctgctcgggaggctgaggcaggagaatggcgtgaacctgggaggcggagcttgcagtgagccgaaattgcaccactgcactccggcctgggcgacaaagtgagaatctgtctcaaaaaaaaaaaaaaaaaaaaaagagagtgaccttgaaatcgaaactagtattgtatgcaaataaatggcaatggggaaaaaaagttcttaggctttgaagtacaattattttgaataaaagatgggtctgtagggagctgctccctgctaatgcttattgccaatggtattcatatgcagacacttttacctcatcaggctatacttagaagtgtaattctacagacttatcaagtcaatcttcttaaatacagtatacaatttaccttcacccagtggttctgaaccctgtaatatccaatattcttttatagcatatatttatgaatactcctttactacattgaaatgaatttcagagacagtgcactttgccaatacagataattctgaaaaattcaatgcaaattttctagctataatataaaggagaaataaatggaaagtaatgtttcaataataggtgctctgttatgaaaccctaggagacctgctgaagcagtgagtcttggcatctatacgtagaatgcaatatctccaaatgcagattggttcaggtatgttgtgttgatgactaagatgtcacaaaggactttttctccagtggtgtggttttccaaaatagagaacaactctcagcaaggttccagctaatctatttacattagagtcagattcttaaaaaatttggtcaactttgaaaagatgcaaacaatttgtgtgtgtgtcttcacatgtaaaagggagttaggttcttggctcagataattgtagacatgagtttttctcagtgggacattcaaagctcatgctaaatgtgggatggttctgtgatttgtggcactgattgttgtattgcaggacatctgaacgtctttgacctcctcccagtacatgccaaacgtgcccctccagttgtgacaaccgcaaacaccctaacaagtttagagaccacctcctagggtgttgtaatctaaacagggttataaacagagcttccagggggctcccatgtaactttcaagaatttacatatttaatttctattctcgtgaaaatggccatgttccaatagttaagcctcttcccttgatgtatttcccatgccattaatattcagttctattccacaaatatttattatatgcatatgtgtgtgtacatccatctgactatacctttctatgttatgtacctttactagaattccaaattataaaatcctgtcagtttatctcttgctagatgaatggttttattgtttttatagaatatttgctttaaacagtactctcatattttcttgaggtgctaaaatagaggaggcagctgtagaaaaatgcactacgggccaggcatggtggcttatgcctataatcccagtactttgtgaggccaatgtgggcggatcatgaggtcaagagattgagaccatcctggccaacatagtgaaactccatcttactaaaaatacaaaaattagctgggcatggtggtgcatgcctgtagtcccagctactcgggaggctgaggcaggagaatcacttgaacccgggaggcagaggttgcagtgagccgaggtcacgccattgcactccagcctgggtgacagagtaagactccatctcaaaaaaaaaaaaaaaaaaaagaaaagaaaagaaaagaaaaatgcactgtgccaggcacttagaacattgagatgaaggagcacactgtgtagtagggagacacatggatggatggacagacagtgatgcaggttgagcagttctatggacaggggaccatgcaagggtgaaggaacatggacagcagagagcaagaactggagagggcttcctgcaagaggtaatgtcagaattgtgtgtgaggaatgaacaggagtctgacaagcattaaaaagggcgaagaaccttatcctagcagatggaacagcccttaaaagggcacagaagctaaaaagaaatgagctatgaagccatgagaagatgtagaggaatgctaaatgcatattgctgcgtggaagaagccaatctgaaaaggctacatgcagtatgattccaactacatgacattctagaaaagtctaaactatggagacagttacaaagatccatgattgccaagagcctgggggaagagagggatgaatcggtggagcagagaggatttttaggctagggaaactattgtgtatgatactataatggtggatacatgtcatcagacgtttgtccaaacccataggatgtacagcaccaacagtgaaccctaatgtatactatggattctggatgatattgtcagtataggctcatcacttgtaaccagtgcactactctggcatgggatgttgatagtggggaaggctgtgcatgtttggggcgggggctatatgggagatctctgtacctttctcttaattttgctgtgaagcaaaaatggttctaaaaaaatcaaatcttgaaaaaggcactgaagtataaaatggagcagtattggggcaccaataaaccatccagtctctccagaactgcaaactaactgctactacagcaagagagaggggtcagcaactacctgcctgcagcgggggtaggggggagttgggggaaatggcggggggtggggtccctgacagtttcctcagaagtgggttgacgtattctggaggaggaggaggaggaggcagcatgaggcagcaggcaggatgcatttcttgaactggatcatggccaggtccttacagctctcccactgccacctttggcaaacattcctgggatcctgaaggctcagacaaggcccatccctcttatgttaccatggggattatctcttcctccttttctcttttagttttccctccaaggaagggttgtcactccttttccaaaaggaagaaggaccaagtgaatgattttcaagggcacagtgctgttatttctcgagggaacctctgccatgttcttgagcatgttgctcgttttctccttcccttctcttcttagccctctccctctcgctctctcctacctctcccccttttcctttttctttcatcacaaagactacaaagagtatacatggtcactgtagaggccttggaaaatgcaggggagtgcaaagaagaaagtaaaatcctgtaaatatcctttgtccaaagaaatccaccactaacacgttgataatcgtacttctgaatcttttctctgcatctacatttggccccaatgcctggtgctccactggccccacagtacccctcccacctgctacctaccctgtccaagtttccctgccctcgggtactggcaggggttgtcaccgtgtcctggccacagcctgtgccttccctgtgttactccatcagctccttctggattgctgacctctgctctaaccactgatcgttcatgacaattttgctacccaccttctgcaggtgacagatccttctgcctcagaagggggagtgctactgtcctgctgtcctagagctgagggagacggacaccactctccccggtaacactagattctcaggaatagatacaacaccttccaaactgcagctgacaccagctgtacattgtaacaagacttttaagatttaggaatgtcagagagatattacccacagcagttacatcacatctgcttacagtctggctgttcttggagcccagaattccaggcctgttccagggtgtccaattgagctgtgtccttgacctgcctcgaggcagctgaagccagcttgccctgacctccaggagtagctgttgcaggcaggcagcttagctcaaaatgagagaaactatggctaatttaaacaaaaatgaaaataattttaaaaaggatattggatagctaccaaatccttgggatggttggaaacccaaactgggaaggtaccttgttaaaaacaatgaccaaatcacaccatggaactggtcccggaggaagccactgctgtgtctgcccgggcatatacagggcggtggcccctggatgctgctgcaagaaccatccttgtgactgctcctggagtggggcataccaacattggtaccaccatccctggaatggcttccacagggtccctgtttctttatataacatccaagatatgtctgctcctgcctgccaccccacctcccatggaagctccccgctgatgctttcacttccatcttgatcaagggcaaggtttaccttccatgcccaccccactcagggttccagtccctcaccctctgtcggaggacctaggaggatccaggactcttgagagctgggctgtgcacaggtggtgaatcaccagcagaaagctctgcatctagtctcttcctcttggcctccagactggacgttttgcttcccaccacccaccccccgcaaccggaagactctaggaagatctcgtccctcccactgtacttttgctccaggctgagtggccattccgccttctctctgtctgtgttcctaacccggtcttgcctactgtctggaagaggagaaagtggttctgtaagtctgcctctgagaatctccacacctcttttcagaatggtctggggagtggcgggtgccagtgagacgaaagaggaggacggaggacagaggactcttagatgactacttcaaggtttaaccctgttacatctgcatgggtgtggttcaaagtctgaattatgtctttatggctgggaaagcctgggtcacatgcttgtctcctcatagcaggagaggctgggaaagtcagtaggtggtacattgcagcttctgtactgggaggaggtctctgtctttcaccaaactaaagaaggatgttcaaattattggtgggcaaaaagaatgacaaggatcctctgacgtggacatgccctgtgatcacattagctctgtttggtcacagcatgatagtggagtggcttgggcgacctatggcagtatcattgataatcatttaccatacaccacaggctgagcgtcaccagggttgatccaattccattttctaatctttctcctaacatggggtgaacatcaggaggcctggagatcttcttttgttgcttttagattctcagtttctggtcctctgagaagaactgttcaaactgttcatgcatatctctactaaacactttgcaggagcaatggaatctagaactgcattttaaagagaatactcttgtaaaggaaatagtatctacagagatgcaaccctaccaaagggtagggcactgttgactactttatcttatggagcatgtgtccctggagtcacagccttgggatgcctacatctgctttcatttgcatagctaaacagcccagtctcttcatgaaaggtaatagtctactttattcattacatttagctccatgaaagagtttgcatataacttaattgttttaagaggaaaaaatgtaccaattaaaagccaggacatttattatgcatgttcagcaatcaaaataggcttcagtgtagccttctatttttttttttcttttttgagacgtagtctcactctgttgcccaggatggagtgcagttacatgatctcggctcactgcaagctctgcctcccgggttcaagcgattcccctgcctcagcctcccaagtagctgggattacaggtacctgccaccacacctggctgatttttgtgtttttagtagagacagggtttcaccatattggccaggctggtctcgaactcctgacctcaagtgatccacctacctctcggcctcccaaagtgctgggattacaggcgtgagccactgtgcctggcccagtgtagtccttctaagcaaatccattctaatcaaatgaaggaacagtgctcctctttaataatcataaataagtgatagatgaataaggaaatgaatcatgtatgcatttatttgtccacaacacacaattggagctggcatttcctggaggcatttgtataaaacttagatgagatcacgtcccctaggatgtcaaggtacttgccctgattctgccatgaggcctccaatggaaactttgtcaggagtagaaaacagccaatgtatgtgaagtccaagttcattggcacctccctagcctccttgcagggttgtttctctccatcactaatcccctgttttggatcatttgcaacaactccctttactacgaagagggaatcttgaggtatgagcagtaaatatggagactgtggtaggcaaacagttccacagtgtcatgaggtcccttttacactctctcactctgtggattctttccccttcacaacacgtctgatttatcacaagctgtgattaattatttccttgcatgactgtttaatgcttgtctcaactcctactagctctgtgagactgggggccattttgttttactcaccggtgaagttagctcaatatctgacagagagtaggtacatgataaatactcattgaaaaaaggaatagaaaagttatagagttcagctatattcatagcttgaaaaatatgctaaaggaattttctcatttgtaggtgttcctgtccagttcccttagtgcaggccttcccagtgtagggtttatttctgcatgactttctataaagctgtatttccttcttatctaacttctcgttcctagtctaactagaaagttcatgcatatccctttctcccttctctccattttctttttatctctgaaacaattaggtacacacgtagctgggaagccttcttgtatgcctccagaaaaattctagatccctcaaactattgttctatctcttctttctgtaccccaatttttttctcaattatgctcttaaattatccttctgaaagattttctaattttgtttgcttcttgttgcctttttctcttctagttcacacacctttctctgtaagatttcttaatgcttattttattattatttatagttttatgtggacaagcatccctagatgcttacattaaaagtatttgtctaaaaaaagaaggaaggaaggaaggaaagaagaaaggaaggaaagaaagaaagagagataaatatggaaagaaagagaaaaaaaggaagaaaggaagaaagaaaggaagaagaaagaaagaaaagaagaagaaagaaagagagaaagaaagaaggaaagaagagaaagaaggaaagaagagaaagaaagaaaaagaaagaaagaaagagaaagaaagaaagaaactgtctattgggaagggcgttgtttactgcttatccagcaatacccaggtatttgtataggtgttgacctaaatctatctgaccttgaaggctgtcttcaaatcttctaacaggcaagataaataaggtcacagaaaatgcatacctgtttgtcatttacctttattcctgggcctatagatagttcttctgtctagtagcctctgggctactcatgggagtggggatagggatcatatgacaactttcttctcttttacgtgttctgggtactcttggatactggttccagggaacagctgcatagctaagagatgggtgggaaggacaagaaagagtaaagtgttcctagaggagccagcgaggcaaggggtgttttactgacctagtctgttttatggctacatgagaaccctaacactgctctccccttgccctggctgcttttccaggttcttgtccttcccagacagctctagccagggctcagggttccttaatggctgtcccaatccactcttcttttagcagagcacccttagcaagaaacccactgtaatctcaccctacttttctgcttttacaacatgtcttccttccgggtgaacattcacaagctaaagaagggaactcaccttcccttgaggagagcttgctgaacaccagaggatttcacctctttcccccttcataatggaataatcactgagctttctgctagaataaaaaaatcatgggccgggcacggtggctcacgcctgtaatcccagcactttggcagaccgaggcgggtggatcacttgaggtcaggagttcaagaccagcatggccaacatggcgaaaccccatctctactaaaaatacaatcattagctgggcgtggcggtgcgctcctgtaatctcagctactcgggaggctgaggcaggagaatcgcttgaacctgggaggcggaagttgcagtgagctgagtttgcgccactgcactccagcctgggcgacaaagtgagactctgcctcaaaaaaataaaataaaataaaataaaataaaataaaataaaataagacaaaggagatgataaattaaagcctaacattactatattccctttatactgaagaatatggtttatatctgtggaaagatgagtttcctaatacaacctcagaattagataggagatcacaaggggtaactcccaaaaggaaggggagaggaaggggctgggttaacagttcctgggtcagaataagagttgagtggccatgtgtattgcagcaggtggagctccctatacaaggaaagcactggggcggaaaatgagcatttatcctattagaatggtcttgtgccttcactcctgtgcactgcttagccagggaactgtgcccttacaccttgttagccagtggaagaagagtgagtctaccttttagctgtctgtagcattgttactgtagtattattgtatgcttctgtttatgatggtggagaggccatttgagatggaggcattgttcatcatgctgctgaaatttgagtaggataaatttagaatttggataggtgagcagctgggaggggcatcttttgggattgtcaggagttactcagttgatgtggctcatcagcaggtgtcccattctccttacctttccatgggctttctttcatgcttcaaccaaagagaaggacccttcttcagttaaggatttgtctggatgttttctacatgtggtgtgatcgcttatgagttttcctgcctctgagacctaccttctgaatgcctgactgacaaagatttaaaggtcgtccattacagttggcatgcttttatattccacatgccagagctacaagaatgttattatttcctttcttctctcccaggtgatatatttggtcacctaggtgtcattaggtactaagctttgccttcaatatctaccagggtggggcaccatggacagtgccacaaagaccttttcagacaaaggctcagatcttcctgctggactttgtgtgcaagaggaaggaactttttcttttcttttttccccttctctctctctctctctctctctctctctctctctcccttccctccttccttccttctgtttcttccttccttccctccctccttccctcgaactgccatgtcccttgcaactagaatggtccctgacatttaaggttttaaataattatgtgcagaatgaattaaatgccaaatcttgtgttccaatagcgtattatcttcaaatgttaacagcaaccagttttttagaatagaaaacttttgaaaattttaattaaagtcttcctgcagtggaacagttgattttttttttttttttttttttttttttttttttttttttagtcggagtctctctctgttgcccaggctggagtgcagtggtgcaatcttggctcgctgcaacctctgcctcccgggttcaagtgattctccctgcctcagtctcctaagtagctgggattacagacatctgccaccatgcccagctaatttttgtattttttagtagagttggggtttccccatgttggccaggcaggtcttgaactcctgacctcagcctcctgaagagctgggattacaggtgtgagccagcatgcctggcctgagtttttattatttgtgaattttatttttttccatcccagatgcacctatattggtagtctagtgataaaaacaatttacccatatataccaacatctttttcaagaactttgcatagtgaaaccagcaaagtactgaactggccagtctgtcataggtgtcttgcaacatgactcagagtcagaagctggatataaacttttttctgtgtgtgtatatatgatccatttgtgtattcggcttttgagtgggactttttcagtaggcttcttgaaggttccacttcactattctcactgatgtgtgcttacagcatctctgccatggagattttaggcagagagtgtttaaaagctctactcatagtttatagaattgctagtgccacaaggccattcattgtgatgatgaaattattagttataagtgaaccttctaaaataaatcttggaagaaaacatgttataagaaaatgaagtcagtcctcttactaggcagttcccatcatctttccattttgagaaattatcctcagttcagatgtattactatggtgatgtgtttgcatttcaacaaaccaaaccaagccgtaaactgagctctgcatgtttagcttctgtcttaggatttttaccgcagtgtctttattcttgagtaaaatccccgacatcctggctagaaatcacaatgaataaataatttcccagccagacaaaacaatctgaattgctaatctcagaattctaagaaattacataaagatgcaaacaatggggattaaagagggggtaaaaattaaatgaaaaaatagcccacaaatgaatggaaatatacatgctctccaaaataacattgtggaagtaaacaaaaacagacagagaattatgcttaatgagaattggacatgtggcttagccctctgaggcctgaaacaagtaaacacttcccgaattgtcagtccatacatccctctctcaaaagagagctcttagaactggctccctctcctcctgtttacgaagcttacttggtctttggaacaattgcacatataattttaacaactaaatgaactctacaggagatgggttttgagtacttaaaaaattcctatagtttgtatcaatcagatacgggagatagttttgcaaaatactgtttgtgtaaagagaagggaagaacatgcgctctagtctaaccaatcaacaaagtgtgaaaacacgatttagacagaagtacaacgaccatcctatcagttctacccaaatatcatatcagaccatctcttccctgataacagttttgttagcctaaggacacattagctcagttagatctgggctctcacagagctttctgctagcggctctgcttactggtaagtaagccatgcaattttgcctagcaaccccaccgtggaaacacagctccattctgtaagtggcagggggatgtggcagggaggcagggagagtgaggtttgtgcctctcagaatccctctgcagctggttcctgacatcgcaaacgttatctgcaattcttggcagtttcggaaggatgatgaaaaatgggacggggaggtggctgagcctggggttttggaagtaggatggaattaattggaaggcaaataaaaaagcttccaagattgtgagctgcgactgtctgagagctcaaaccagagttggcaagaggaaccaaaggagaatgaggacattttttgtcattgacaatgaggtatacaatatatccaggaaaggacaaccagcagcgacctcctgaagctaaacagagattatcttaagccacatatgagggaacattcctcaatggcaaagagaagcattaaatctgggactgtctacgtctaaggaaaaatttgagcatttacattaaaatggcctgttaacaagcattgaatattaaccaggcactgtgctaagtgtttgcacacttgtttaatcttccaaacaatccgatgaggtgggatttcttatctccattttatagaggaaaaaaactaatgcacagagaggttgagaaacttgcctaaggtcactcagctatttagcagtggggttgggatgtgtctcaggcagtctttccctagactctgtgctcttaaacactactatggtttttcagcagcagtgaacagttacagggctaatggggataagaaaactgaagatcaccacacggcacatgagatggtttgtgattccattgtgaaagctgcagtttaaaatgttcaattaaggcaactttttttttttttaaatacctagagggcagcaaaaacatgggtatctagaataacagatattgctaaaaccttacgcccacagcacttctttttatagcaaagtatgggtatacacatattttcatacacctacacacacatacacatgcaagacgcgcatttcttaagtccctaaaataccctgataattaaatgctccaaacattctctgagtgtgacccttggatgtctaggagaagcagcccaggaacacacttgttagccggggcaatgagtagtggtgaaatgtttaccttgctgataaagtctccagtagatgatgcaattaagatgccacgatctagcctttgttatacacctccttgtctgccgtcaaacaaatccaccgctgtccttccccatcttccctcctgcccatctcctgaagtccaggaacgtctccagcttcctacgtacttgcagtcctcttttgccaacctcaacctcatttagattgcaattacattcacatcttaatttatgacttaacaagcatctcacaaacatttaattcactttaacttcactatgcatttgaggaggaatatttgaggaggaatggtactcccattgccagcaattagattgacttaatgatctatggcgaaatctccttttgggctttgaacttttcatacatttctgcaaacaaaactaggctaattaaagtaagttcctggattctcagaggggcttacctgccttcacaaaatcctcctgtaatatccaacatggaaatttatgaaatagacaaaactttccctgcagttttcaggtaatttatcttgttacgacactttcatgtgtggaaaagtcgatattttcatatatagtttcaacaatatcaataaattgtaatttttttttcagatggcttctctgaggagattaggagggtttctatatcaaagcatagatcaaattatttttccctgttcccattttatataccagatgccttcttaggagttagaaaagtacctcctttttacaaggaaggatggcatttctttagcttttcctggacagatcacccggtgaccattttttattctcagtcttccttcacagaagggacagaggactgcccattttcagcaggagttagtctgatttcttctgttagatgcagacgactttgtttgacaactttctttgggttggtgaattgttgaattacttgaaaagctgtttccgttgttaagcactggactgagaattaattacatcagaattctaatctcggctcattagtggcatcattttatgcaagtcccttaacccctcttggcttcagttttgcatgtgtaaaatgaagtatataaagcaaaggtctctctgtgcttggtgcgatgaagaggatgcaggtctcatggtacggatttcctatattgattgccccaaatgtggtgtacgtttgcagaaaattcatctaggcaatgtagaaaggccatacattctggtgttaaacacatcgttcatatatttatgctagtatatgataccagggcctcctgatgacagtctccagcaccaattctgagaattgcgaggatttttcagcttagagtttttcagcttagagtcaattccagtgtcgccttcagcacatccaaagagaatatgaccgatgctaccagtcctgctcctggactccactggtatgattcctttgccccagtatcagtctaattcccattctagatgcttttttcttaatgacccaacaactgactccttcaggagctggcatgagatgagatttgtttgcagagatgtataaaaatttcaaagccccaaaggagatttcaccacagatcattaagtccatctaattgtcgtcctactacccatttagacggggaccctgttatgctaactcctatcctgtctcttgtgagtgatacagtcaacacacatgatgatcacagcaccagctcagacaggtgtgttttaaaacaaaagtgtgttataaatgtacagcctcagcagggaaaatgtgggggcgaagaaacacacaaatacttggctagagtcggtcacaggtgaagatggggatgactgtgttttccgtttcatccaaacattttggcctgactcagataattttttttccagcatattctgtttgacacaagggaaacggtgcaaatccatcaccaccattgtggaaagagctccaaactcattctcacgaatggtggatcagtaatactacatgacaaatggtagcatttttgggaaaccattatatttgcaccagtgagaagtcagaatcagcatttgggctgcagtcatggaaccatgcaagaaacattcaaagcattggctaagcaggatttttttgtttgtttgacctggtgtccacgaacaggcttcagggagcctgagaacctcctagaccacttgaaaaattctgaatgcacttttctaggaaagagttcacagcgttcatcaaatttcctccaagcagccaatgaccagagaaaggttaaaagtcactgacacagtaccgttttctgtgcatctatatcctgaatccagggtgatgccgctgacttgcctatctttctcctttgctcttcctagaaaaagcaagtgagtcagaccaagatccgggtcatctcaaccatcctgttcatcttggccggctgcattgtgtttgtgacgatccctgctgtcatctttaagtacatcgagggctggacggccttggagtccatttactttgtggtggtcactctgaccacggtgggctttggtgattttgtggcaggtaagcaccctgggcaggccaggcactggggctctggcgggaaaaataatctgttggctgtgcttttcgcaatcgataaaagatgttgcgggagaagcaaatgaagatgactcagtgtcactactgctgtgaagaggctcatttcaaatccctagtcctatgtaatataaataccataggtttttttctgctatgaaaagaaagccaaccctttccttctcaggatgcttatttcccttatcgtcacacaaattatgcaagactaaagtgaatttctcattaaatcttgaacttctgaattgaattaaacctctctaatccaatgataaaggctgtgttaggaagtggcacataggaaactcagatgagattagcatagaatttggtctgcagtgacctgcaggttcagcttcctgactcccaggtgagagccattgtctctgcaaacgttgtcctgcacatgcccagatacaaagctgaggactttggtgactatggggagctgagaactgcccagagggaatataagctcatggattatgcaggagtgtatatacaagcaatagccttccttgtaaaaataaatgtggatgagctatgtttaaggaagtgaaaaaaaaatcatcaatttcatctagggccagggaaattgcaaatgaaatgagatttagtttcatatgtgcaccagtttcccaaaagtgtggtagaaaggtacggatagaaggaagaggccatccttctctttttctaataggatagttctagatgttcagacaagtgatcagtttctactacaagaagtgaacactttgatcaaacaactctatcatctgtcacaagtttgaaatgtctggatggagtgtgtgtgtgtgtgtgtgtgtgtttcctttaccagttcctggtgaagtggcagcctgacctgagccctaagcagactgtttttttttgtttttgtttttgtttttgttttttttgaacagggtctccctctgttgcccaggctggagtgcagtggtgtgatcatggctcactgcagcctcggacctctggggctcaagtgatcatcccacctcagcctcctgagtagctgggactacagacgtgtgccaccatgcctggctattttttattttcattttttgtatttttcgtagagatgggatttagccatgttgcccaagctggtcttgatctgttgggctcatgtgatcggcctgccaaagtgctgggattacaggtgtgagccactgcacctggccagactgttcttgtttggcgtgtgatcccagcagtgtcttgatttctccatggaatactgtgcacatcaggaggatgggttctggtctctgggagtctggcaaacaggaaattctggaagagattgctgaaggctcatcaataggggcatgcgtgcctccctgttaattttataatacaaataactggcagagtggttttgtagctcttccaattgggcagacaaagactgaattccactttgtagaaataatagggttttttttccccttcctttttattggttaaggactaagaattgcaaagtgactaaatttagttttttttagcttttaactaaaaattgatttttagtcagtgtgactaaaaatcatttacagaaagcctgtagcctgggactctacccattttccccttacgcacagtgctcaaccatggatgtctagttagtggcctcaagctccgaagagagactgtacagagaaactgagaaaagtaagaggaacagttatagatgtattccagttaatcccttggcatcatccgtagccggtccgtgggaaaactcagtggtgtttccaatctaaggcaaacacatgtagtggcagctggaattttgaactatttcacaaacatctttaagtatccaaagcataacctgcagtgggtggtgatttagagctctctgggatagcactgggctgtcctgaggactgtctattataagatacctgtgacagacacagatctctaaccaatggctcagttcagtctgttaatctgaggcacaaatagcagaggcctgggagtgagattttttaagtgatgcttttattatttgttatctaccatggactgagcacttagtacaaactagtactttaccttatctttacttacctagtaagggcacaacctacacagtcccaggcatccacagttttactgcccttgtcagtgattacagagccatatttcctttgtcctgaggtttctgtagaccacggtctcttaaaagtcacagtgctgactgcagttaggccagaccccttccaagctccagttttccgagcttacacagaccaatctggagaatgcatgcctgaaaagactggaagtttatctctatcttttggtaacagtctgcgagtgatagggaaggttgcccaatcattggaaaacgatacattaacaagagttgatggttgctgtgattcgacatagtatgaactctactagaaatgtaatcagatcattgatcctgcaggattgattgctgatttattttgcagctgactcactttaggacagccttacaatatttcgcaactctgtctgggagcacacacagaactccgaatccagataagcagctcataaagggatacttagaagggtgttgactgcctgcttcattgttccttgttcactagcgcaccctagtgaccatctttgctgggtaatagtgacttgcaaaggtaaatatttactcccagatagcccacaggagaaagctacagatttctctggcgtagcacagaaacgaaatgaacctcaaaaaccacttactggtgcgggaactcagatcgtatcctacagctctaatgatgcaggagagagttgtctgaaaggaaaaaccaaaagcagctgcaccaaaccgaagggggcttggcacagagaagttggaattctaacgttaagaagtggcagcagctgtcgagcctcatggtctgctgcgctgtgttgctgattgggtttgagcttgtcgagaggagccacaggtcacatttcttgcccagctgcctttgccgtaagactcagtggcgctagatgtggttacaaccttggtctggtgggaaagtctgtaatcactcatcacctaatacgatagttaccaatccattgctagtatctgtcatcttagaaatggccactgcctgcttccttaggcaatagcgtttcccagagagagattgaggctgatgtccgttatttccaggagcttcctcacttctttaggacggtgggttgggcttgcaacctgttttgcatggctgcctccagcagtgtctgtaggaaggttagaataaataggctaattattcagaataaatgactggtcctttcaatggaacagccagtcaatgcaatcaggcaactggccaatttggtttgatggatttttactgtaatccttatttataaaataaagggattggcctcaaaggtcccttttagttctagtttatggtgactctaattactcagcctaactgaccctttggagtagcactatgtaaacaccattcctcagttagcattaaatcactattgcttgcatcaaaatcccagtaatgccattaaagctaattttactttcacacatccacttgtctcttagtaaatgtatgggtgcttaagatggaaatggttccaagaattccaaaccatagggggtgatatgattatatttgatttttattaaaataaatttagagaagtttaagaaaaaacaatgacaaccaggcctgatctgttgtcctgtagttcagagttattcatccttaacgctcaggtcaagcattagtaggtcaagttggccactggcgttttttatttctggtattaaggttagtggtcaagaatcgagggaagtaaagccttaagttaggcttttttgggtaagggatgggtaccccccttgccctctaaccccggtccaccttgtacacagcaaacctaacagctgagtgttaaacaatgatggatgacgtcttcactacatggaatggaatatgtgttctctgcaaagaccatatgctagatcatggttaaagtaacatttggttgttttcagggggaaacgctggcatcaattatcgggagtggtataagcccctagtgtggttttggatccttgttggccttgcctactttgcagctgtcctcagtatgatcggagattggctacgggttctgtccaaaaagacaaaagaagaggtaggaccccttcctaaccctatgaatgttcctgagaacagatgagcttgtgtccagaattgcctgtctctgtcctgtgggctggagtgtttctggctcggttttgcagggggagcggggggcgggtcataggcttcctcatgttgaatcagtccttcaaagctaaggagaatagaatacagttatttctggattctttttttggcaggtgagaaaatatggtgattcgtttaccagcccataaatcctggaaaaactagtaaacaacagctgattttaaaaaaatgaaaatgaaaataaataggagaggtagactatggctgagtgtgtgtgtgggggggtgcagcctgtccttccggtctcagggtctgtgcagaaaggcagttgaacgccaagaatctttcctgattcagtaagaaactgaaatcatcgaacattgaccagctacggggaagtgagcccaatgggcctctttcacttatcccctcttggttgtcacatccatagagacaaatatacatccctgaggaagggccgtgcatgtaactttacatgaagggaagtaaaggaagacatatgaaggaaagatagattttgtgattaaaaaataaatattcatgtagctctcttaggaagagaggaaaagaaaggaggaaggccaaggaaggagaaaaaaaagagctaaaagaaaggaagggagataagaaaaaccaaagaaatagagggccagcctctgtttgcttcattctgtataaaaggccccaggagaaagttgctgaatggagagatttcccacatcagtttcctgggcccatatgctaattttcctggtttatataagtaagccaggaaagtaagcaatgcaatttccagaccggttccccagacagctaactgacctgctgaaaatcagctataacaaaagagaagggaacaacatgaatattgactttcctggatgcacaaatttgagttcctcatttgcagagggaagcatgggacttatactgtctgccctgttcattaagagccaagaaatttggtgctgatcctcaggcaaaactccactctaaggaggcctgttctgtgggctttggcagaataggccgtcttcctgcaccctgactgggggaagtgggttaccaggtgccctggagcatcttcttaaaccagggaaagccccacagcacatgaccatagcatggcccagatagggtggccacccatcccagttttcccaggactgagggagttcctaggacacaggactctgttttaaaactgggacagcctcaggcaaactggaacaagttggtcaccctgccaggatagaaaaccagaaaggcagggagggcagaaggcctgctgaacatctgctgtgcccaggactgagtgaggtgcatttccttgtctcaggtgagctatatatggtcactcaagtgtatgttgggggaatgaggccatgcaattgataagagagagctggaagccaggcctgtccaactccacattttaacctctcctgcaggatgccgtccccctctctttaagtcaccatctccaaatctgaggcttcttggggttgcccaccacgtgtgtctccctgagccaccttatttactagccaattagggatgggtgtccaggtggcagaagtactagggcagaaggtagcatttgcacctccccctgggcatgtgctccgtcacctcctggcctccccgtggggacacccgagggctgtgggtgctgggaggccaaggcagggaggcatttgtcagcatattgttgctcttctgtctcttggccaggtgggtgaaatcaaggcccatgcggcagagtggaaggccaatgtcacggctgagttccgggagacacggcgaaggctcagcgtggagatccacgataagctgcagcgggcggccaccatccgcagcatggagcgccggcggctgggcctggaccagcgggcccactcactggacatgctgtcccccgagaagcgctctgtctttgctgccctggacaccggccgcttcaaggcctcatcccaggagagcatcaacaaccggcccaacaacctgcgcctgaaggggccggagcagctgaacaagcatgggcagggtgcgtccgaggacaacatcatcaacaagttcgggtccacctccagactcaccaagaggaaaaacaaggacctcaaaaagaccttgcccgaggacgttcagaaaatctacaagaccttccggaattactccctggacgaggagaagaaagaggaggagacggaaaagatgtgtaactcagacaactccagcacagccatgctgacggactgtatccagcagcacgctgagttggagaacggaatgatacccacggacaccaaagaccgggagccggagaacaactcattacttgaagacagaaactaaatgtgaaggacattggtcttggactgagcgttgtgtgtgtgtgtgtgtgtgtttttaatattcacactgagacatgtgccttaaacagactttttagtccaaaattacatagcattgaagaatatatttcactgtgccataaacaactgaaagcttgctctgccaaaaggaatcagagaacaagaacttcatttcagatagcaaacgcaggacacaccaagagtgtccgtgcacgtagccggttctggccgtacatgttaagggcatttcagtggcagtgctgtacccctgggcagtgctacctgggcacacacgtagacaagggcagctattccttagaccagcctcctgaaagaaacaggtgtgtctttttagtggagtcgtagtaatatgtgcacacacagaaggggacctgattgggtgggagctggttatgtgtaactagcgttggagttgacattttggcatgtgctctgagcttgaattttgataccaaccattcagtgcatcatacctagtctttctatgctccaaatgaatgtctgtggggacctgagagcacctggaatttgttggaagcagatcagagcacacgtacgaaaaggtgcaattgcttttctcatgacaaaagaaaaaaaataatcacaaacacatcacactgtggatatcaccttaaccaatgacagaagcctgctgagtttggtctttctcacaggggtaggtagtccacatgaactggcgagcagtggtgaaaacatgacatcaactgctgcgtggttaaaggccaatcatgcattttcctcagtgggtgcaatggtgacaataaactgatttggaaatgtccatgtactttggttataacttgttttgataagaggggtagaaataccaaaacaattgccttgcatgatgccagtggcttgctgttctgtctagctgatcctacatttttacaaaagtagacatcctgcatttctgagacacactgaggaggaccatggcatctttccatctcagggctttttgtcccttgggtgtcttagggtagacatagtgataagatccaatctcgctatctccaaacaaaaagaaaatgtaccccttgtacagtaagcttgaaatgtttttattgcttgcagcgtaagtgccattaattccatttaacaatgatacttagaaatatttaaaatatttcattttacttttatgtttgggcattcctttattctgaaaaagtcaccactgctccttgcttgtttctacatctcacatcggttactcactaaaactggaacaccctagactgattgttcccaggcaaacgataagctaacacatcataattatgattggtctgtgaggctagaacatcccgcagaggaaagtcggggaatggctagtcataggttgcatgatgattttaaatgggtttgtatcagaaaggggaaaatacatactcctgtgtatgcctcagtctttatcataattggctggttcacagctagctctttgggccacacgtgaaagcatttggacctggcaacaccaggcagttgctggttatgggtgttctaggctcactgctaccttttacagagttcacgggattttacgtaactaacccgcagtgtggatttaccaaaagatcacagcactagcggagacttccagaaactgtctcatgctttctgacctccagggaaagttgtacccacgacatcctcaaccactggtaccatggaagacctgtccctgcccatttctcaaaaatgcacagctcttccctgcctggagcacatgaagtcccatctccctgtccccagacctttaggctctgttgaagttctggcattgcttatgagacccttcctgtccaaggaaggtctaagtcaactcctccattggactggagatgaggctcactggtgacatcctgtgtcgactcagtaataaatagtcacttgggaggcgatgtttatgcaggtgtggatgttgagttttactatgggaatcattccagcctgacaaaatgtgttttaaggaataggtagataactgggacttcctctgttattctaacaagtcgaagcttcctaattaaactgtccatggatctcacttatttggtttccactctgtgttatctggtacgttctttgtagcagtgtgttaaaattccaggccctacggccaaatctggcagaggcttccctctcatttatccagtgccttctgtgggccaggcacaggattaggcactttatgaacgtcagctcattgaaacttcacgacactatgtgggaagtatttgcaaacccattatatacacaaggacacagaggctcagggaagctatgttatttatccaatggcacacagcaagaaagtggtagagctggtattcaaagtctgaccaaagtctgctttcaacttcactacagtgtctgtgtcatgcatccttgtgattgtgtgtgtttgtgtgtatgtgtgtctttctagcttcatggacacagcttacagatgtggggagcagatatggtggaatctccaccaccaagagggcacaaggtctttgtgtaaacatggctcaaagggttgcccctgcagacacctactgtacatttatttggttttggaaattttgtatgtggcaccctttaaaaaatgccctttgaaagcactcttttgcactttacttgctaactttgtagaaactctgcatacagcaggaataaaatagttcaaagcactaagctgcatactctaccaaatggaacaggtgcatgtgttggtatgtgcatagatgcttccccaaatgagtcaaatcagtcacacagagggatcaaacataaccttgggctgggggtgggaaaattttctacataacccattccctgagacatttggccaagaatgtgatgaacaaaatcaaagaagatcctctatggtgattgatcgattaaatatgtgtgcaaagtgtttagaaacctatgaaatactctcgcaaagatgctgagagagaataagaggttggattcctcttcatataaactaattttggaggaggccagttggtttgaagttacttgaatgttaccttttttagatggggccaaatggcatgtagaatacacgtgataggtcaaagctgctacacattctatacatgcatcagcacagccccccctttccaatctgcactcccattccagcataaacctaggagaaatgtttcgatttcacacaaagaaagagcacacgtccaccatcttcagtgggggctgtcttttgcttcactggcaagcaggcactgaatttttcttgcatgacaaatctggaggtttactggtgagagagccaatgggcattttttcctggaaagagtacagctccatacccagtcctaacccaacagtgatatttatcactttggggcagggctgtatagagtgtgtgtgtgtgtgtgtgtgtgtgtgtgtgtgtgtgtgtgtgtgtgtgcgggttggggtggtgttgggccatctctggcctgttactaaggtaactaggactatttgtgttccagcagtcatagcctgtgattgtgggtgcatcagttctctgcctagatctcttgttaccttgtctgcacatcaagggagggagttgagcacagatacttgtcaagggccattgtagttgtgcagttctctaatgaaacactccctagtccatgagttcacaaaatttattaagattaaattataagttggatttgtgaataatgactaattaattgtcttgcccattttaggttaaggtgagagcttagtctcttgccctttgggatttgtcttttgggggattaatggagaccagatgtacttgggagactggtgtccaaattcggatcatgccctgtgtaggctctctctatcctcccttatagctctttagtgtactgtcaccgggagggctcatgctgtgagggcattttttgcatggtgttaagactagttaaagaaattttaagctgttgttatttgcagtcaattgtagtacttcatgtatcatgaattcaagtactatgatcagacagacatctctctctctctcacacacacacacacacacacacacgcacacatacacacacacacacacacctgaggaaatggctgctttgggttctataaggaccattccatgtttaaagtcctagttgagctgaatgctaagaacctgcccccttgcctccctctgagatgatatcatttcctggcttcgtcaatgctgcctgtctatttgcatgctgggttctgaggactagtgagaaggtgaccagagtttgggtggggctggtttttacccactggatttggtgagaatatgaagcatccagtgtgtaccagggtttctgaaccacgggaaaggcgtaggaaaacaaacattcagagcccctgtaaaacgagaaaggaaaaaccagccagtgttgcattccacatctctgcttgttgcattttgctaatatggggttattctttctcactgttaggatgcaattgtgtgcaaagacagtggctgagtgaacagtaagagctggctagtaatggccttaaaaagaaaaagggtaactctctgaaacaaagatcactttagtgtggcattgtggatgctgttaattctgcatagggaaactttggaacagcatgctaattacatggctgtaagcaaagccctgtcctctgtctctgcaccataccttcattggacttcaccaacccatccatactccatgtaaacctcagttctctcatgcctgccctaagtcagttgacatcagtgcagtggcattgaggagaaatgagaggtgtctctgattttactgaaagttattatcattttcacaggtgcctgagatttggtatctactttgtgttcttgattcttaggtgaaaaatctgaaatagttccctgtgcattaaaataaattattttgagaggactcctgctccgtcgattcagcagacctatgctgcagaaggtaactgcggaagctctcttttgctgtcagggctctgagcttgaagggagaaggtgcagtggtgcctagaagtgatatgcaaaccacctcacatgccagcctctggcctccttcccatcccagagtcacagacaggggacccagtgacaatgatgataaatccatgtgtggaggtgttttacttatttttctttccgtaggatttcatggtgctttaaaaaaaaaggcattttacagaaaataatgtggggggagggagatttcataatgttcttagggaaagtacaaaacaaatttgcttgtgacatttcaataagctgtgctgctattgtctttatttgatgatgtaatttttttttcaatgatggagaaaaattgcaacaaagaccttctggaagatccaa

SEQ ID NO: 441 - DNA, 244253 bp, Homo sapiens
  source 1..244253: mol_type = genomic DNA; note = NC_000018.10:c28177130-27932878 CDH2 [organism=Homo sapiens] [GeneID=1000] [chromosome=18]
gccgtttctccgcgccgctgttggtgctgccgctgcctcctcctcctccgccgccgccgccgccgccgccgcctcctccggctcttcgctcggcccctctccgcctccatgtgccggatagcgggagcgctgcggaccctgctgccgctgctggcggccctgcttcaggtacgcggcggtccccgcgggccgggccacgggcggggtggggcgggcggcgccgggtccctttgttccccgcgccgctgcggggccgggctgcgcacccgggaagggaggtgccacgccgcgccgcgccgcgccgcgcggccggtagctgcgcaggcatcgggctccgtccgggcgccggggcagggttgccggggccagtaggtctctcgcgcctttcctggcggggctctaggggctggattgcgggtcccctctgctccttcttcggggccgagcaagctcgcggggggtgtccccaggcagcaggagggtgaggcaggataactcccaggttttgcagttttctgtgcctttcgcccctcgcatagtactttgctccaatttttttgtttatttctgcagggatgggtcgcgagtttacagtaggaattctcactctggtgtcttagttacgggacttgcctccaccttaccccaccctgcacccgtgcgcctcccggtgctcaagggctctactgtcctattgtctttatcccagtctggagttgcctccttttcttcttctcttgccctcacaatattctgtgttcgtcccacctggaaagaaaatctggccctcttgcccggaggagtctctgccggtcagcgcctgcctgtagaacgagtctggcctctcacgcctagtatctcccccgggcgagaagttccgttacgcggctgctcctttctctgtccggctgcctgtgccctatatgcgccccgggggcgcctttgcctggagccttccgtacttttcataccctcgggagagagccagcgagccttttcatttaatctctactaagaggctcctccgcggcaggaagcacctgctccagtccgggcgcaggttccctcgccactgcacgctgcgggttcccagcccgggggcagcccaactttccgccgcctccaacccgaggatgcccccaggctcctcccgaccagccagcccaggcctggaggccacttcacacagcctcggccgggaccctctagctgggcgggtgcagtgccctggtcccaagtcggtctccgcctgccgtggggtccctcgaaggttgcgggaaaggggcgtgcccaccctcgccgcggggcaggaaaatccacggagggtccccctgcctgtcgccctcggggcaaggggagaggtgctctactgccagctggcagccccgaaaagtgcggacgcagctcggaagtgcctgctccgggggtggagacaggtggtgtggattaccccgctccgtggtcttcacgggtcagggcctggcgcgctccggcccgccggggggtgagtgctgctggggcgggggcaggggctggacggggctggcctccgcagtctctcgcgctttctcccgcaacccctagacggtcgtgggccgccgccgcgcggagccctgtccatggtgcgccatggtgcggcacgcctgtccctgcccggctccacgctctcctcccgggtcgtgctctctcactttgtctctccccacccctgcctcccaggccagggtcccagcgttccttttccctttcttggatttcttcttttgttctttagtctcctaccggtctttctcccttcccccactcgccatccgccactcggctctctcctgactcggggatttcagaactattagactagacatttttggcctttgcagttttggagagtggatggaattccttctaacttgggggaggagacctgccagtcacttgctaacaaaagtacctcctgttataaaaccgccctttattctcccagcgcacactcctcattctttgacctcctgtcacttcatttattgtttcttctttaaaaatggggtttattaaagaggttaggctgaaggaggaagaaggaaaaaagtcctgcttctaaagtatttgaagttaaatggaaggcaagacaaacttaaagactcctgtgtattaggatttttttttaacaaaggagatgtgatacattttttacaaatcttactttaaaaacactaatttttggacagcattgggtcgtcttatttacagacagtaaatcctcagtgtgaatccagcagcagatggttattttcacaaactttttcatctaaaagtgagttttaattgaatactgtgcagcgaagttaggacacgaagagacatttgttggtcatgaatactgtgggaaatctatgtgtgttacaagtggagcactctcattttctgttttagtcatctgccttgaagtcaggtgtgaattttctgtcagttttttcttaagtgtttctaaaaatatcgtttataagcattaaataatgtgcttttccattgtatgttctttctcagtttcttctataccaatgttgacttttttaaaccttcaggaaaggagaaattataactttctcatcaagttatttggcagtcctctaattcatgagtacaagtcaagcagtaacattgaatgatttgaaaggtcattaggagtggaagcagagcagtttacgcaacatgagttttagggttaagtgcaccatgtggattgtacaactgagattagaaatgactttgtgctaatggtctgctttacacgcccgaacaacaaagctctatctgcaaggtgaaagtggctgtcctgcagtcagctgctattaacagtctaggttttttttttcttttttttttaaattccagactaagcagccgatagttttagaaaagagaatatgtaggttattagtgcagatacggagcacccttgtttttttacaagctaaatataattgaatattcaaaggactctgtgccttgaattgttaactgaagtgtctgtgtaccttattttacttagagaaattactagtttagttagtcttgttatgtagatttacataattctagtcaatcttgcatgttatgatgttcaacatcaagattttctttagtcttattttaagatgttagccttttttatattaaaaaatccgaatttgagcattcagcttacctgataaaagtataaaatattatatcacaaagttataactagctttccttttaaataatacaagtgactttcaaatctttacataggtttattgttaagaaaaaaaatcaatgttgcttttaccattgacctagttaattaatatattagaaacctgtgttgtttttctagttcacatcttaattgcataaccccattgttctaatttaaatacgtttgtatgggttatggggcatctaggacagtattttaatgttcatagaaattcatttctaagacttaacagatcctggtttcaaccctgcgtgaggaccttggaaaaacgatggataaaccttatgtgtttttcacctattaggtacagattttaaagaaattaatattcaacatatgaagtatacataaaaagaagcagctttgttctagaatgtggcaaggattcagcagtgattttaagtgtaaatcgtgtttattctcagtatttatttgattttcatgtgcttttgaaacataagttcttgtgaaaataagaagagttaacttggtgttcagagtttacttactagacacagttatgtatatttctttgcttttcttaacttgaggcatgcggtcattactaataggtgaaaggttacaaacatactaggtgtaatttgaaaaacagtattttatgtatcctcacttgtttttaaaacactatatattaaaccataggtactttctgacttttatactttcatcaaagtctgccctaaccttctaaaagttcagactgagattttacaaggaaatactttttagatatttcttgctttttacatgtagagactaaaatctttctggagcagattattttcatgatggtatagagcaccaaactgtccttaattttctttttcattaacaatttcaattcttaaatctgttgtgcctcattaagctttagggttattaatagggaaatgtcaagacttaaagcaacagttaatcttgctttaaatcctattttttttaatcctaagtgattaaaatccccatcttcttttcaaggggttattatgaagttagaagagtgatttttaaaaatcagagctgttatttaagaagtgttgtgttcgtatatacactaccatttttcccaggttaacattcagatttgttcttttggctcaaatacaaaaaagtaatcaagtttaggcactgcttagatttggtggtggtttttgtcagccatttaaaaatgtgatagatttttaaatttggattttgtcatctgaataagtatttcgctctgacagcagtatacttgctagaacctaagtattttcaagttaagagttttaagttgaaacataattggtaccaacaaatcactgtgtctcacatttctgtttttttctactaaaattttatttttattttaatttttcagaaaaagacatcagttaatttgagcagatgctagtctttgtatttaactaaatacatgtaagttttaattaaacaaccttatccatgccaaggaagaggtatatacatattaatgttttagtaagagctatatcttctgcatgtatgaagtgataggtctaaagtaggcagaacaaggtgaattcacaagctaaatgggactttttgaaagatgtagatttaaacattatgatttatgttataatagtctctttaaggaaaatttagattaaattctgcttagatttttattccttgtcgctcactctttggtactcagtgcacttcctcatctgcttccaactgtacttacagcccccaagcccttggattgcatacacacacgcacacacacacacacacacacacacaccccaaatgtatgttgaggactgctatatacatatgagtctcctgcaacactgagtacagtctgatatgaagtgtcaatcaataattgattgattactttatgtcatgaaaggtggtttaggcaccaacagtataataactgatctgtgtaagtgaatgcccttgtgtagtgtcaagggcaagagctagtgtccagggcaggaagcatggggttctgatttcgtccagatgtagtctactctcttaaagtcccgtgacctcattttcctcaacaataaaatcttgggcctagttggattagttgatctctaagagactgtccagttgcatgattcctggggctacttaaaaaatatctcaaacacatctccttttcgaaggttgtggaaaggcttttttcagccgaaaatgtaagaattttcagatacttggagtgatagaatgtgagttttgaagatttattaaccgtagtttatcgtgataggtttaaagtcatctatattttttatatgcctgaattttaaacttaaaattttcttcattggctgtgctacctttgccagtaaaagtaaacaattttggggaggggtttaggcttaaaggaaggtaagtgtaatattactgagaataaaaattatttttaggcttaaaatgaaggtaagtgtaatattactgagaaaattttttttattagttttatgagctcatgtttctttgagagaagatagccttcaggagagccattgaattgagtgatagggggtcaacattaaaaatataagtgggtcagcattaaaaatacagctctagccctttgtcaagttttcctctagcttttttttttttttttttaaagacagtctcgctctgtcaggctggagtgcagtggcacagtcttggctcaactacatcctccgtctcccgggctcaaggaattctcctgcctcagcctcctgtgtagctgggattacgtgtgccaccatgcccagctaatttttgtatatttagtagagatgaggtttcaccatgttggcaaggctggtctcgactcgaactcctgacttcagggaatccgcctgcctcggcctcccgaagtgctcggattacagacacgagccactgctcctggcctcctctagtttttttttttttttggtacaggtatgcatgtatttatgacaaacacatggtatagatacatatacgaagatatttattgaagcattgcttatgattacgaaagattggattatttgatctctaaaagtccatgagtaagaaatgatttaagaaattatggcataatgttaagctaaatttaataacccctgctgtagggaacaaaacattttctactagttcaggttcaagaaagcgattgttaagccacctcatgttttgggaatagtcatgaacctaaaaaagctacagagggccaggcatggtggctgatgcctgtaatcccagcactttgggaggccaaggcaggtggatcacgaggttaggagatcaagaccatcctgcctaacacggtgaaaccctgtctctactaaaaatacaaaaaattagctgggcatgatggtaggcacccgtaatcttaggtgcttggaaggctgaggcaggagaatcacttgaacccgggaggcggaggttgcagtgagccgagatcatgccactgcactccagcctgggcaacagagcgagactccacctcaaaataaaatttaaaaaagctacagagaaggacaaccaaaataaatgaggatttcaggcttctgaatgaggattaatttgacacagaccacaatataagctataactgagaaatatacaatcaaacagtagatttaagaatgaagataacctaaactaacactaggacaatccaagttaggtttagaacaacctatagcagcctgagctataagtagatccaaaggaagattggctgaattaatggatagctaaataatggatacgtttccatgctgacatcatggaataaccactttatgctgagttctcagtgcctgagagattataatagttgggtaaaccatggtaatatttcacattctcctgactgattgaatgtttaacttttcatctgttctaatagtggaagtgtaattgaaagtggaccttactagtatgtggaactggagatacagaagaacatttagtatatgaatgagagttctagtgtacccactgccttgattaagtaagcagtttaacttgggtttttcaaagtagcattgggagaattagttgtatagtgctttaaagcagcttgagctatttaaaaagagttgctattatacatatggtatgggaattataatgcagagatgtttgatccatgatctgttcttagattttctttcataaaatatacctagctataatttaaaaattagatagtgtacttacctactcccatatattgtagttttaattttaatactgatttttgtgtaattaaaaacattaattggccattataatttaaaacatgtatgcccagattttctttccattctgatatgttacttaatgtttgggtggattaaataattagttttaaaaagtaaattaaaaggtgcatagtttggagtttttattattccagaaatcactggcactaaaaatgtaaaatgactcttttctcccttcattactaaaatacactttgagttttcttaactttcttctgttgcactaaatattggattttgatgttactgctttcgttaaaggttgtaaggattgcccttttagttttttcccacatctgcagttttaagacattcctcaatttattttatatttggtaattgtcagtacgtcattcacagaactcagtagagcagatacagcagagaaaacccttgaaactaggtatttgctgctgcctctttaaagagtttttcaagccaatgtctgttagtattaaacctcagaaattaagtatttttaatttcagggaaggaaactattatgtttcagttcattgtttctgtaactctatgagataggtggttttgctctcattttagagatggtaaaactggaactcaaacattctgaatatgagaatccagaataaaaccatatttgtcatattcaagttgggcttgactacaaagcatacgggtttctccctttatcagactgcagccctttttgtataatacccagagaatgactgtcacaataaagaagagtttcagtttctctctacttagttgatttttttttctttaaataattaacttttgaattacactctctgtttaatcttggccttaaatattttgctttcttttggcatctgaagccaaaacataatgcttggttaagattttcattcttttttcctgtggtctttaggagagaaaaaacattttagaagcattcataatcagtttttaaaagttcttctaatagttttgatcaacaaataatatgctggtaagtactcaaaaataattttttttaatgaatcttggaacttaaaatactttctgaaagcctataaactctcaggccacaagaccacacattttttttgaaactcttttttccatattcttcagggtgaaagtaaatgcaagatattccaccaccaatttttgaaaagttttaatgtttaatgttcaaacattttccatatttgaacactttgcattactttttcgcacactaataatgttatttggcatattttaatatacatgtccacatcttgaaatgacccactgcagacaagttccggtgaatattctgtagtgtaactgagtacagatactgatttgtttgctgctgggaaaaacctagaactattttacttgtaacttgacctgttgttggtgggtggatacacttggcttgactgtaatcttgcacgaaatgtcttgtttgttggttgggaaactattaagtggaatctgaaataaaggactaaaaaaaattacatttactaaattgaaaggggatgtaatccccccgctcccgcttaacataaatctttaataaactcgaaactgtgaccactttgttattatttttccttttgttgtcttaattggttaacacagacattcaaagtctgaagttcattctttatggctctcgggttgagtaaataaagaaaagtctgtttttgcagcgaaaatattggcctttggcacccactctcttgctaaagtctatttggtgtcaacacctttacgattgagttctaatatcctgctacctgatatgatattttagggaactcaaaattcagattatgtacatataatacacacatatacatttactttatggaagtgtcaaatgcatacaggaaaatatacatagaagtggacagcctgctaaatgttcctaaatggaacatactagttaatcagcactgaatcaagacagagttttaccagtacctccttccaattttaaccgtccctcagtggtaactatttatttgacttccaacagcatgatttttttgctcatttatactttgtgaaaccatattctcttttgtgtctggcatcttccactcagtacgcagaatctttcttatatttatatcatatgtatttgtaattgtcacaaaattaggaaagacggacactatagaaatatattggaggtaaggagggtgaagttggtttaaaatggaaagattaatcattttttgcagctaaaggccactcgcacatttatggtgtcaagccactaaataccttttgtgggttttcttacaatatcttttgccatagttctggtagtttggcaatatcacttcagccaaatgccaaatacatttggaattctgttaagttatagtctctcttgtccttccttttattagaacgagagtggagacaaagaactaaatatctttctgacctgaagtttttaatcagaagatttaggtgttaacagactctaatcttttcagcgatgcttcttaataccttctctgagcttactagtgacccagttttcaacaaggctttacccagttttttgtttttaattttggaaagggtacattgaggggtttctacttccacacactgtgtgtatccgggtaccatttacctttttttatatttgtatatcttttttaaagatctgagagtctgccaggagggatgcagattgtccacatttgtcccagcatctttctttctggaggccttttctgtttataatggtttagtagctctagattgttggtagaggcttccatgcataatgatgaagacttaaggaatcaaattccataggtaattgcccaccaaggatttgttggcttcaaagcttctctaatttatttatcttcttacacttgtggatttaattttaccatattttaaagattgtgcttttggtgtggccttagcttattgatagataatttgtatttcacttgcttttgcctctacacattgttttgctgccataaaagtaattgtgtacataccatgtttgtgtttgaggacttcacttcttattcacagttctatctttttttgtttgacagataagaacatttggggagaatatcataaccattgatttaatttacaaattgatttagaattaagtaccttgtaaatgaaactgagttaaattcatgatttggtttatgatccttctctttatttgaggccttcttgatgaagctgtgttttaaagggagatagtggtgtactcaaacgtcgataacagtggattattttgcagattgcgtataacattttagggtgcaaaataaagcatttggaaagacaggttactttttttagtatttgcatatataatagatactgtcaagattgtgattccttattttcataagtcttgattcttcataattaaaatacagacatatatatatatatatatatatatgagtgtgtctgaattactcctctttggtaggtaagcagtcatataaattgagacctgtccacctccaaagacagcttcctcaaacgtcacactatgtcagatattacttatctgtttgtgttttcacatatacatattttacttacctgaaatttacttttctatgtgttttgtggaaagaggtcttgctttattttgtcccctggattttgtatatgtggtgacatatatacacacaataatacatttggcatttgttaaagtttctgtttttctgaactgaaatgcttcttttatcaagtacatcatttctgtagatttctaaatctttttctttcttttctcttaaggttacactgacttagtagcctgaagaagcagtgtgacacagtggttaagattggggactctgaaaaaaagaaaaaagaaaaaaaaaaaaagattggggactctgaagccagatttgcattggttccctggctctgacacttgttttttgtgtggacttggacaacacatttgatgtttctctttcagtatgcccatctgtaaaatagggataataaatagtatctatcataaggttgttatgaagaataaatgggttagtgtgtgtttgtgcgtgtgcatatataaatcacttagaaaagtgctttcaggctgagtgtgatggctcacagttgtaattccaatactttgggaggctgaggccagaggatagcttgaccccaggactttgagaacaacctgggcaacacagtgagacctccctctctacaaaaaataactagctgggtttggtagctgggtgtgggagcacacacctatagtcccagctattccagaggctgaggcaggaggatcacttgagttcagtagttcaaggttacagtgagctgtgatcacaccactgcactccagcctgggcaacagagcaagactgtgtctctaataatagtaataataatagaaagagaagtgctttcatatagtgagcaagatgttggatatttatttgaagattttgggacctggtcattaccattgttttacacagacacaatcaatggataatttaattgtttgaataagtttgagcacttaatgcatgcaagactttgttctatattcagtgtgacaaccagataaattatagctcagcagggactacctaccaccagtgttccatcgaccacacttggaaaccacaattgaagggcaaatattttaacaatcctccttaaattttaacagatgttatctaggctgatataattccactgtctttataattaggggaaggaattagtgtatgtagagtgttaattctgccagtgatttgatttggaaacaacaggtatatcagataggagcttttctgttgtctcctcctagatctgtctcttgcttctgtaatttaattgtttcatatgctagtaaggacccatgtgtgtgcacatgtgggagtatgtgtgtgtgtgtgtctgtgtgtgtgtgttttgagactaggctagaatcaaagttactcagcctctgaatgcttttaacatgatgatgacaaccctgtagaggagagggttgagtgtaatggtaccatattggttgatgccagtacagcatctgggaaaacagggaaggtggattcattgttctcataggtgctgatggtttattgacgattagatgcaggaagtattgcctttaacttagcatctttctattctaatagtagcttttcatttttttagtaattactatgtaccacacgtggttcaaagcactttacatgtattaactcattaaattcctccccaaatatacccaatttacatattaggacaccaaagcatggtgaggttatctgagctgcacaaggttattttgttaaatgttggagctggggtttaaatgcaagtagcctgatgtcagggcctgtgtatctaggtttgatatgtatttgaatctaggcagaaaaacaccgaaagcagattgacatccatttgtattttatatatatatgaaggtcacttttgaaaaataatttttattgtgaagtgtgatatgaggatacgatatagaggagtctataaagtgtatgtgtactatttaaaggacaattaaagcatataaagtacatccatgtaaccaccagcctggttaggaaaacagaatattcctacttccttggacatccccagagtactgcatccattcccctctctccacccagagttaactactatctggcagagataactactatctgggtttttctaacatttattcattgctttcctttgtagttttatcatctatatagacatttttatatatgcatatacatcatgcatagatgtatacatgtatcatgcatgtgtatatataatgtatttttctgtgatttgctttttctactcagcgttatgtttataagattcagctgagttgtatagctgtaatttattcattttcactgctgtagagcattgcatgctatgaatatggtacaatttacttatttggtttattgttgatggacttgcgtgtgtggtttcagttttttgctgctgtcagcattcttatgcatgccacctgggtataaatgccagggatactctagggctgtgttccccaaactttatatgagaatcaccagaaagcttgtttaaatgtggatccctggccctagccctgatagtctgattcagtaagcctacagtagagcctgagaatttgcctgtctggcagactcccaggtgatggaacactgttctgctcttggatgtgtaccaaggagtagaattgctagattgcaaggtatgcatgttttcatcattaccagctaatgcaagattgtgttttccatactggtctgccagcagtatgtgcatagtttccccctaattttaggatacttgttgtagtcaaacctcaacatttaaaaaaatctggtggactgcataataatgtctcattttggcttaaatttgaaatctggtttctgatgagagtttttctatgtattttgaccttttggtttgccttgaagtgtctttatgaacactagcctgttggatgaagtttgtaacttgtctgtagcttggccttgctgtgtgtttctcattctcttcacctaacattttcagtcatggcttgtgtaggtgtgttttgaagcactgagaaccttctagatagccgacacaggggattaatatttactgagtgcttactatgagccaggccaagcacttgacctgcattttcatataatcctcacatcaatcctctgcaataggtagacgttattatcattatccatcttacagatgtctgaacagagattggctgaaaccactcacctgaaggcacactgttgtgaggtggctggccagggctttaacagtgctttactttcctgataacaactcggccagttccttgaaagtctgcaaaagaatggacccagtgggagcaagattagtctattctggactttgaaggattgttgcctaaaggaggatttggactttagaatgaggatttaaaagatctcagtttcatggagcaaactcggcttaagaatgggaaaatctaacagattgagccagatgcaggataggctaccaaagaagcaggcagtttctgccgctggccatgcagcttcttggtggtgactcggagatgcaagtgtctcatgagctgttgatagttccttctgtgaatcactctctttctcctgacctcaccccaccttggcccagttctgtactcacccagcaatctaagggcacatgtggctttctgttccaagcatttgtgctcccctaagtacatgaggggtcttggttgagtgcctcagactcagcacagagacatcctagtgggcctgaggccctgctggcacttcaacaatgttatttggaccaacttctttttgatcatttagccttggcctttgagtattcagtaagattgagactttgtagataattttgttgtctttgaaggggcctaagcaataatgctccttatctatttcagttctggacaaataagacaaaagaatcagtacatagagaaccaaaattacaacatttattactgataaagacaaggttagagaatgtggctttaatctttcacatctcagatttagttacccttggcatcccatctttgacagtgctcccatctgtcgaagcttacggacctatagcttaacaatatttgcatgacataggtggcgtggctctgacaggaagaaaaggtgatgaagagcctgggttctgtatgcccactcgttttatctaagttggccaaaggtcaagaatgttattactagtgcagctcccactacatggaagtagaggatgaggtttacactctgacggtccccaaattttggattgactgttgagctcatgttcttagtcatcaagtgtgtgcttattccaaaatgtggcaactcccctcagagggcgagatgggcatctgtcaggacagacttattcccaacttcttgaagtcttggaagatctatagctttgctttttttttttttttttttttcgagacagggtttcactctgtcacccaggctggagtgcagtgatgcagtctcggctcactgcattctcctcctcctgggttcaagctattttcctgcctcagcctcccaagtagctgggactacaggtgtgtgccaacatgcccagctaatttttgtattttttggtagagatggggtttcactgtgttggccaggctggtctcgaactcctgaccttaggtgatatgcccgccttggcctaccaaagtgctgggattacaggcgtgaccactgtgcccggccagctttactttttaaagagttcccaaaccaaatgatgaccacagcaacagtcttaacagttttcaaagttagaaagcaaaccaggctctgctctggaagagtcatccaggtgaaattgtttctcagtgttccaaagaacacagtagagagcttgtggtatgtgagggatggactgatagtgggcagagaaaacattcttcattttaacctttcctggatgctggtcagtctaagcctcttgtctataatctgcaagctttgaactaaacaaagttgaaagggggaagtggaaacataaagatactgaatatgctagatgagaaaaaaggcacctcaagaaggacaaggatcattggacatttctgaaccttgtgctaggtgacagtatctcagatgccagctttctgaaagaaaacccggtatgcatgaggtaccccaaatggtaaataggaagtgctaaacaacctcccactgggagcctctccccagttgggttttggtttgcagccagcctgttcaaacctgctttccctttgagactttcccttcgtctcccttggatctgacagcccagtgttatcaccatgttgggtttggtctggtggttgactggtggaacaggtgttttcagtctcgggccccactggctctttctctgccatttactatggagttgctttggccaaagacggctgcctcaagggaagatttcttgttcacttgtaaaggccatccagaccacttggtggaggctgacccttgagccagtggtcgagctgtcagaatccatgctgtccccaccttgcccaagtgagacccttgctagtgttcttgaactcagtgttattaaaaaataacaaacattgctcattgactagtctttaggcagtagatgttgaaataatcctctttttatgcccctcagcacgttcaagctgaggcccctcagcacttccagagtcctgagctaccttagaccattgccaaggccaaattgcggcagctttcacccagattgtggcatccctcacccaaattgttcaccactgggctaaggtcgctgtgcatcctgcctcttttctattctaggatccttggcctatagtctttcctgaggtcctgctgtttttttttttatttttttctcgaggcgctacctcttaaacagctatcattttcctggagataagctacctaagtggtggtcaagcatcaaggtcaaaatactctgtggtttagaaatttaagccttttgatgttaaaagccacctctccaactataaaaaccagccaccctacacaatcaaggctataaaccaccaagttaaaagaagtgccgggggccaggcgtggtggctcacgcctgtaatcccagcactttgggagactgaggtgggtggatcaccagaggtcaggagttcgagaccagcctggccaacatggcgaaaccctgtctctactaaaaatacaaaaattagctgggcgtggtataggacacctgtagtcccagctattcaggaggctgaggcaggagaattgcttgagctgcggaggcaaaggttgcagtgagctgagattacgccactgcactccagcctgggtgacagagtgagactccctttcaaaaaaaaaaaaaaaacaaaaaaattgcaggtcctgagtaaagcacccttttcccactgccagaagcccaagttcctccatgagtactttcttcccctacattggactccttttttatttctcaagatccccagatagttcaccaagtgctgaagtctttgaaagggcccagtaaataggacctgtcctccctgtcttgaattctgaaccgagggaaatgtaagccagcagaatcagaaaatatgaaaggaaaatatcaccgtagtcctgataagcactagggtggcaggcatggccttcatctattggcaagtcccccttacaatgaatcccagaatcccagcatttcaaagacatgcccacttccttccactgccagattgctgcagggaatctgtgagctcccagcatggaaaatgagatcaccaagcttcttttctgtggacctgtgactcccagatgggcggagtaggggacagggttgggcaccagctgctcagattattctttcaaatgcaggcttcaggtaagtttggtccatccctctttgtttaacataacactttacaaactttttagtctcaggactcttttacatgcttaaaaaattattgagttcttcagtgagcttttctattgtagataatatctattgctgtttaccatagagaatttaaactgaaaaaattatatatttaattcacttaaaatattaaaccagttgtatgcgtaacataaataacaatttgtatgaaaaattactgtattttccaaaagagaaaaacaagattagtgggaagagtagcattgtgcctttacattttgcagtgtctttaatgtctggcttaataagaagatagctggcttttcatatctgcttctgaattttctctgttaaggtatcacacataacatagcctctggaaaactttactttacacttgtgagataatgagagtgaaaagggcaaatatgttgtaatattatggaagtggctttgattttgtagattccctgagagggtcgtgggaactcctaggagtccactcctcggaccatactttaagaattgccattcagggtaacactgactgggcagtggaaagcactgggacagtgagagttagcagagtgccttcccatggaatgaagcatcaggaagggaagaagcatttcctctatgggttacactgtgaaactatccagatgccaaacatcagtcacccaagatatccatgggtggacaatgcttgtccttcacccttgagttgaaactggaactgacgatattagctctgcaacctctcagcctgcagggcttggagatttatttctttattgcttgatctattagaacaccactggatggggtgctgcttccagaataagttcaggaaaggctttgaactctggcgttatgcctcctttcgctgcaatgcatttctggaagctgtgccttgaatgttgttttctcacaagaataatgctataattgggttgtgtttatcttatcagggactcagaattacataaatcatcactatggccagctactcaaattaaatcagagttccggggactgtaaacatctgtaaccatttttaaaaagtgaaaccatgctccaggttttatgaaatgggcctaattgtacatgaatacaggggactccagagcaaataaagtgtataaagagttcattatagactataattattccttcatcaatatcacctctgaaaattaacatactagccatgatagctattgactgataactttccatgtatacttttagaagagtttgggctggggggtgtgaggctttgatttggaggacttaaaacaaaatgtttaaaaaagttttacctgaagtctttttttttcctaattttttccatagtgaacagaaacattgaaattgttttattagcatatatcacatatcgtatgcgagaatcatattttaggagaaagtttattatggcagcaggcagatttttcacttagtctcaattcatataggacagtttccagcccttagccagttaggtactatgtgtcaatgtatgtgaatgcttcctaatggaagttgtagtggttgggttaagggtaatccccaaggccttttgatgccggtttgaatagtgtccctaaattgactaactagatgacttagggcagttttctttaagttagtttccttgcctgcaaaatggcggtactaacagcatctacctcatagggttattgtgaggactatttaagatatattgcatggaaagcattgtagcatgctttttggcacatattaagcactcagtaaatatttgcagtcactgatattgagtgtctttagttgaatgaatttccaagttcattataaacagtctaatgccaagtgctatactatttgataacattttgagtataagcgtgttgcagtctctgctgagtgtcatgagttgatgggacagaatcaatctgagccatgattggccatctctcctggaatgccacgggcacttctggaactttttctgactgtttaattgcacagctgcctgggccattatctaatgatagtattagccttttacctgccaattaaatctgtaggtacattgttactacctgttacattaagcatccacttcatggtaagctcctgtctatcttttgagactctactcaaggaagcctggaagcctaggaagcctcttctcactttggcagaggagatgtgggattgcacagaggtctatatggatgtcactcgatgtatgttttcatattgtcctaagccctgataggctctactcctgggaaggtgacatgctatacctgggaaggtgacatgctatacctgggaaggtgacatgctatacctgggaaggtgacattctgtacctgggaaggtgacatgctatacctgggaaggtgacatgctatacctgggaaggtgacatgctgtacctgggaaggtgacatgctgtacctgggaaggtgacattctgcacctgggaaggtgacatgctgcacctgggaaggtgacatgctgtacctgggaaggtgacatgctgtacctgggaaggtgacattctgtacctgggaaggtgacatgctgtacctgggaaggtgacatgctgtacctgggaaggtgacattctatacctgggaaggtgacattctgtacctgggaaggtgacatgctgtacctgggaaggtgacatgctatacctgggaaggtgacattctgtacctgggaaggtgacattctgtaccacattttgtatgcagacccagattttgacccagatttttgtccatcaaactcttgtattgtggggctgccttttagctaagagttcagtttcaacagtttgcaggttcctgtgccagcatcaatgctgtttttgcctattctctttgtccttacttgattaaaagaaatgacaatgagaaaactaaaagtactgatactagagatactcaaggacacatcctaataagataattaaaataaagatgaaaattactaggctgtcagatggggcaaatgtgtggcctcagtgtggtattcattgaacctaagctggtctagagcacatcatgaaggcaagaaagagttaaaaaacccatgcaagacaagataatctccttccagaatggtacttgacaaaacaaaaatattgcagctgttcagggttaaacttctgcacgttttaagcatttttgcagggatgtgaaattcaaaagtgccatcagtggcattactgacacagagaaaatcttgaagagtggcagtagctcttgaatagtcttcttaacatagcctccaacatcatggatggaatcctgtgagatgtcgagaatctggcaactgtaattgtatggtgagaaattggattaaaaaataaaaaaattagtcgtgctgaatgttctcgaacagtgtcattactctatcaccatgtactcaactaacgacgttaacagtgtcttcattaactgtttatgttcgcttatgtcgtttggaagacataaccgcataataaaagtattaccatagttgtcaccctccctgtactgcggctccatcccccaacccacaaatcacgtatcatgaagggaattccacttgtgcatcttttgtccttgtttgtgagtgaatttccgtttttttgcaggcttgatttctttacggtattccttcttcacaaaataattttaaaatatttctcagttacttacagaacaaagagataaaagtctccacaatcaaaacaataccagcatcataatagctaacccttgtcctgtggtgaatcacgtattgttttttaagccctttgtattcttcacaacaatcctaaagacctgtactttagctattattattattattacagaggaggaagctgaagcacagatgaggttacatggcttgccaaggtcacacaggtagtagatggtggaggctggatttaaacctgagcaggtttgctgcagagttctcagtcttaacccagtcctacccattattgcccttatttccacaaggaatcaggggagcaaacataatgcaaaagaaggcctcagctttgttgactgcatttggtaatctcccaaacaataatgtaattgttacaagattgtgaccatggaatctctgatagggaaaaagtaagagatcagtgttttaacctgacatccaatggattacatttaagagtttatgataactaacttagtctaggttttggttaggcagtcttcagagccagaaagaaaagttatgatttccttaggtttaggctgctttcagaggtgaaatttttagccaataatcataaatgatcttaatgaggaagagagtgaggagacaaggcaactgaagtctgtccatggtgattccacatggaatatttaagagcttggatttaggagtgacttggaggaaattggaaagcagattgagtgaccaaggatgactatgaaaaagaataatgagaacgggaaccgaaaagagtagtggactcggctttaaagctcacagcattgagaccgtggaaaaatttgaacaagaacaaaaacaatgtccctgcgagtgcagaaccagaacagagagactgatactcacaggcaagcagaactcctcaactcctattacacttctgtcctctctagacaaggaggtcgatcttcagcctgggaagagtagagtaaatacttgtaagaggaaattgaaactcaagataggtgagctgattgtgcgagagcacagagcggcactaaatgagttcagatcctctgaccagcgtgaatttcacgctggtgggccgagagggcttgttgactgcttgtcatccttgaggaattgtgcagaagaggagaattgctaaaggactggagatggggtaatgctctgttcaaagcaaaagaaattcaaaatcaagaaggtgtagttttcagaataaagagagcatgggattaagaacagaaaaatcatggtttctgtattcctttttgttgttgctaagctattgggtttgaagactagggtcaaaaggtagctgtgccgttttgagaacgttcagaaaggtttccagaggtaaagataagggctggatgtgtggccaccacttgcagcacaggcacttgttaaatacacagatttatccatcatgcctcttgagagtctgttttaatgagtcttgggctaggacccaagaatctgtattttaaacaaatgtcccagattgcttgctgtgttgagtaagtttgagacctaccggcctgtatggcagatgtaccatgagttggattcgtgttgccccaatagtattagtactgtgatgacaaatagctaagacattgaataaccatgtgccagacactatcctaagtgctttacacatattaactcatttaatcctctcatctgccctatgagttggtgctgtctttagtactcttgttgtacagatggggaactgtttcttctcagaggtctggcagatagtatccatgggactgggatttaaagccaggcagtctgacctgttggaagttcatgctgcagtcactctgctcttcttaagagcccagggcttagggccccggggggttggggggtgttgcccctgggcagatttccccaaaccatgtctgggcatgtgacataccctgtttttagcatctaagtagcatctacatgaagactttggggtatctcattagactttcttgatacataaagctggaaggaatgactaaagccagctggaattattaatttattgagaccaaattttggagggttaaatataaattgctccccctaaggacccaaaatcagcagcaaagataatagaggaggaagccataacttaacagttgcctagaaaaaaaaagatcaggatggttttggtggactacaagctcaacataaatcaccaggggctttgttctgctgtaccttttgcctggaatgcccttttccacttccccctctttctcctggcaaatttttaatcatctttaaagtcagagcctaaatgtcacttcagctatggagtcttccttgacttccacggacagatttatcatcccattctttctgcttctttagcactttgttcctgacattatagttttgcaattatttttcctacttgtggcacccgtgttcacagccactcagctggaaacatgagggaaggcatcatttcctccctccctcccccagtgagtccctgcctcagaaggccctatcgatcttaactatcttggtattgacaaaatctgcccctttttcattccttgcagcccctgccctgactcaggtctgtgtcctagcttgtctcccagttgtcacttgtcatcccctatcacacacacactttcccacaaaactatcagagaattctctgtcagatgcattcggtctgtgcttaaaatctgtccctggctcccccagccaacaggataaccccaggcccccaaccatttgtgatctaaccctgtctaactctccagcctcaacttttgacatcctgccttgcttcttggactccggcgacactgaactcattgttattccccaggcactatgctgtttcttgctgccttgttttagttcaagcagtgactgcctaggatggctttcctgccactctctagcgccttgctactccagctctctgcttgggaagcccccagattccctgccctgggctttgctcatatcctctgcatatcttaacctcccacattaaatcttgagctccttaagggcaggggctgtatcttgttttctgtttctagtggcaaatgaacactcagtacatgtttcttgaaagattgtattgtaattatttgttgtacttagaaagactacagagtttgaatcctgccctttctctcttggatgtgaggtcttgggtatttcactgtacctctgtgtgagaatcgatttgctcattagcaaaatgcagatagtttaaccccctcttaaggggcctattgtgagaatgaagtgagataacaatgtgatacggaacttaacacactattcgagggatctgcaaactacactcctgctgccattatttttgtctggccaagaatattttttacattttcaaatgcttttaagcaagaaaaagaagaagaatatctttcaagacttgaaaatggaatgaaattcaaatttcaggatacatgaagttttattagaatgaacacagccatgttcattcatatactgattgtctatgactgcttttgcacaacagcagcagattgagtagtttcagcagagatcctatggactacaaagcctgaaatacttagtttaccctttacagaaaaagcttgccaacccatgcaccattcaaatattagggaaatgtatgttattcacaacctcctcctcatacccacagataacttgttgagggtaggatgcctctttctcctcttggaagttccagaatttcatcctaggcctggcagagtgatgactttatgtgggagtaagcctcaggggctgggttttggctttctgggatgcaggatgttccaagagtgatgaggctacttgagcagacagtgatcctcataccgatagcagtgttaatgggtaggtagatacctctttttcatgtgttgctgtagaacaggttttcttaaccttggctctgttgacattttgagcttggcactcctttgttagggatgctgtgctgtgtgttgtataatggttagcaaattccctgctctacgtattttataatgaaaaagagaaaatgccagaaaccaactgagagccagtagccactagtagccagtagcaccccctcgcagttgtgacagctaaaaatgtgtctgcacattgatagatgtcccctggggagcaaaattgtccctgattgagagctactgttgtagaacattcaggcattagctatgggttagaccagagaacttccaatgcccaacaaggattaccaccacagtgcagtcagcccccctaaggggattctgctcatcagctcttggtctcctgcagtctcatacctggtatcagtcacagccttgtagggttgcagggagaattgaatgagatactgatttaccaacacagtgcttggtgcaaagtaagcctccactatgtccagctgggagcttgtattcatttgagtgcttcctgtttgttttttgaacttggtaactttgctattttttgactgaaagttaagagaggaaataaatagggagaatatatattttaacaattttatggagattgtttttaagaaaatacattatagattagtattttggatccaggattatattattttgtggatccgttttgtcttaaggaagaagaatttaggaaagtttcagctatttaagatgaatatgaaattattcaaagtatgacatgacttccatggatatttaatattagtagtcagtattcattagagatgtgctttaagagcattttttcaataattctcatggccaacctggctggttggtacccttttttacatgaggaaaatgagcatggagaggtttagtaaggggcagcacattgaggacagaaggtcccttttctgaaataaggcagagaacaaaacacagaggtgaacattcactgtcttcctgacagcttcgacatggccctgaagtcctatttctgtgggtttggaccaggaacttggtgccgctgattctcctgccttagggcagatccactgggaaacaagattgaataaaagcttacggttttcctctagtcttgagactttcttgatctctgagttcttacccacaaacccgcatactctactaccctgaacgcccccatttgaaacgtgacccccgtctgctccgtgccttccatcgctggcttctggccacggcgtttctgggctccggcctgacctgtcatgggctagcacctgccatgcttcactgctcttagaagcctggactagaagggtgaagaggcagactcgtaacatgttggtgggacacaggtttacaacacatttgtccattttatatggcaaactggggagttccctgtgttcgtttgggttagctaaaagcaaaagctttcctttactcagtgcctgcactgtgccaggcatggacagtacctggatgtttacacgtgtcaagtatcagactgtctcccagtgtcccaaatttgatgggtgttggaagcctcacttcttatttctcaattggtttctgatattttctctttttcattatgaaatatgtagagcagatagtttgtgaggtgaatactgtaatttgtacctgtgtgtctatgcggatctttacattttacctggtttccttcagtctttttgaaagaaagtaattattacagataaaattgaagccacttgtacaatctttcctgatgcctttcctagttttccttcccctggggtaaccactatcctaaatttcatgtttatcactatgctgttttccttttcttcttacataagtatgtgttcaaaacattatgttatcttttgtgtttaaattttatataagcggaatcatcagtcatgatttctacttttttttgcaagatttcatactgcagtgtgccttgtcttcagtctgaatttgggatgtcacacaaatgggtttctgaacttactaaatagtcatctgtaggttgatttataattaaatttatatcttaatcatacatggaacttaaagaaactgactttttgttttgttttagtttgcctctgagatgtagctgtttggataaatgtagttccagttctttcattttaatgttgttttcttcttttggctttgtgatgatgtattagtccattctccttttgatggacatgtacagaatctctgctattacagtcatgtttcagtggacattcctgcacatgtcaactggagcactcatgtggcgtaatatttccctaggaatatggaggatatatccacattcatctttactagagtttgccaaaatatatgccaaggtgactgtaccagcttccactcacacctttttaggggactggttcttctttattcttcacttgatacagccctttcttgcacataacagacttaaaactgcttactcattcgatgggcctgaactagtatctcactgttgctcctaaaaattttttgagaataaatactgtgatatttaatactgtttaaatttaatttatttcttattttcttggatttgaaaagaacagtttattagattggtctagatttttgcaacattagtatttgcaaaatttcacatgcataattcaggtagtcatttaattatgaagctgccctgcattgcttcatccagacagttgttctgagatctctctgtttctgggacttcccttcttcttcctctcaatttctggttctcactagggtggactgtccctaatgctgtccctatggccactggaatcccttcattgggtagcctcattctactcgtccttcctctgtatttgaatccccattagtacatggtagagtttcctacaattaatgcagatgctacaggagctctgctgagggctgactgtcctccaattgtgtcagtagggctgaaagaagtagggcaactaacttggagggttagctagacagtagtaggtatgactgagttttaagcacactgagtaaattaactgtgcatatgatgatatagaaaatgacagatacttggttactttctaattttaagtgtaaaaacatagttgtattaatctttacttaaatttttaatgtatcactgtccttcaaattatagaaataaatatatagttttgattggttttacttggtataaaatattatctgtcccactgttgtaagtatattataattttatttttaaatgaacatggcatcttgaaaccagttttatagaaaattagctaaaaatataaaaatctgtgtacttgaatgtatacatttttcatgaaaacttaagttagtgatggtgatttgtggagcccaaagactatttggctgtcccccaaaccccacgcccacttggtagttcttcagtcacaatgagcattttaatggaaatgttcagtccttagaagaacctagaatgtgtattatttcgcttttactggactagacaagtgggatttgtttcttctactccagttatcaaaatgattaaccctttgccctctacattctaattgtaagcacttggaaacaaaggggttgtttgtacaagatagttgaaaaaatgaggctttatgccaagtggaatgtttctcagttgaaggaggtagcaatcattgcacacattttttttttttttcttgtgttgcaggcgtctgtagaggcttctggtgaaatcgcattatgcaagactggatttcctgaagatgtttacagtgcagtcttatcgaaggatgtgcatgaaggacagcctcttctcaatggtactatctcaaaagatatatttgtacatgcagtgtccatgctcatgaaacaaattagccattaaaaaagcctaaatcatttctactgtataacaagtatgaatttttcacaatcactatgatgagactgtagggactttattttaggattacagaagagcttatgaatctcttatatacataatttgaaggctcctgatctcttgaaatcgtcagatttcttccatttttaatttacagagaaaccgttatgtaactgattattaccatttttgtgtatacattttatttaaagaataatattttgaagaatatgaaacatctagttctaatggctttaaaatttacttacagcaaaaaattacttagtattttgaattaaagaaaggaaattattataatattttattagataaaacgtgaagctttaatatatagctgaattacattgaatgaatttaacatgtaaagtctcagtgcaagagtatgaaattcatatttttgttatgacattgtttatagcaattactagaaagctaatttagttgtagcatatgtgaattttaaatatagtctcatttcccatttaaatatggatcaagttcattatagttatcatatggaaactcttgccaataagtctagataaaatctgaaataaaacctaagtatcaaaaggaaaactgaaagccctttcctttagctctaattgaaagcaaataaaattttggttagtagtattttcatggacttatttattattacgcaaaatgtcattgaaatgtgaaagcaagaagaattgattagtaagttgtgtttaaattttaattccccacaaatcttgcatatctctgaggctgttttagagagctgcttttagaaaatctgcgtaacctcaactaattaatttacacagagctctaccacacagccttaattgaagtgtctccacagtaccgacaaaccttagtggtatagtacttaagaataccatagacagaggactttgaaatgtaaatggcctcttagctactatcgttcttgggtgcaggttacattttattttaatttctatttaaattaggatttgctctcacctgtgctgtctttctgaagttgatttttaatttttttaaggcattctcttgtccctgcctcattacatggtattttaatgggtgaatgtttgagttagtctgtctcaacactgaattgctatctcatctggtgggtaatggaggtttaatttaaatccgtgtacagcctttctttaacttaatatgacttttggagttcttctgtgtgtatcccattttctttaaatctttaaattattacttggcaccctagaacttgtatgacctgtaaatgtgtataaaatatattgatatgattctgtagaataattcagacagataataaaaagtggaatttgttgcattgctgcagcatatttttgagattcatttttaaatgggtaatttcattttctaaaagcttataatttgttgtttaaagtaaacacatggtgtgtcactagcagccattgatttaagattaattactttggcgcgttgaatagttttgaaaatgatagcttgttttcacattattagataatgctggtgacaggagaaattggacatagctttttgccagtgtctttttaggataactagaaacaggatttttgctaaagttgtaaaggtgaaagattgaaaatattttttactttgtgctctagccatcagtgagaaaagtatgtataatggtctctggtagatttttacagttttggtatatccacttgttcccaattttaggttttagccttttttttttaaacagtttttcacatgacaccattacttttttctttatcattctcagaatatgttaaaggataccagcatcgtaaagcttgaaacatactgtttaaaatattgattagtagaaaaaaacaactttttggaaggaagaaaatttacacaggcttttgtggaacatcagcatttctattcaacacaagcatgttatctccagttaatgtttcttctggagaattgctacttaggataattctgggtttttaccttttacatctttttggagtttttattagaaggataatccaatgctatagctatacactgaagccaaataccacaccataattatatctatgaattctgtgtactgcagtaaattcatgtactgtatatttgccacagctgaaagggatatattacgaggccaaccagagtgatgacttttgctatgattttgtcgcctatagtgtttaaggaaagcagtaattgtacataagaggtatgtgacagttttccaaggcattcacctcatagcatgttctaccatatattggctgactttagagtccaagaccctgttggaatcgtaactcctaactctggatgcttcctttaatttcccgttgatggcatctggggacaggatgacaatggctcaccagtatgtacaatatacattcttaggatacatctgacacactagactttgtataaaagtttaatatgttggtgtattggtaccatgaacgctgatgatttttccaacaattaacataatctttgcaaaaatgcttgaggaacattgaatgtaaggtagagacataagttggtatttgtcacgttagaaaattatatagaagaagcatgaaatgtacaaactggactgtggtttaaagagcattctttcctccccatttccctttattttttgctagtgtaatgaattttatcaaaataacaaactcaaagaactaactgtacagcttccatttatcttctagtttttaaccgtgtgttttttgtgaaatcataaaaagggtgttctgtgatcaaccttaacatttaatgtaatatcacatgaatacatccactctttgaagatagttctgtattttaaaaaatggctatataggcctttgtcccattttgttagcaaaaccagattctgcttaactgtgcctctatttttgaacatacaggttgtttctaattttcctctcttatatgtagtgctgctatggagattctttttagagatctttgatttttctttagggatttttttgggggaatttgtgttcaaaaatagaattactaggtcaaagggaatgtagagtttgacagtatcttttttctttgcattttgtagcatgcttcattacaaggcttgtgtgttagttcttttcaatatcctcatcaccatttaatttcataatatattgtcattttgctctttcccctctggtgaaaaatcattccttttttatcccgtggcatatatatgtttgcctttataaattaggatcaatttttgtatgtttaggcagtcatttttactttgcgtttttctattctgttttaaaagcatttatggccaaactcttcattttaaaaataagcaaattagagctcagagatcataggcttttcccgtgattatatagctctttttttttttaattttactttaagttctgggacacatgtgcagaacgtgcaggtttgttacataagtatacatgtgccatggtggtttgctgcatctatcaacctgtcatctatgttttaagtcctgtatgcataaggtatttgtcctaatactctccctccccttgccctccacccaccgacagttcctggtgtgtgttgttcccctccctgtgtccatgtgttctcatatttcaactcccatttatgagtgacgacattcagtgtttggttttcttttcctgtgttagtttgctgagaataatggcttccagcttcacccatgtccctgcaaaggaaatgatctcattctttttttatggctgcatagtatttcatggtgtatatgtgattatatagttctttagattgttagcagcagatctggaattagaacccaggtttcctgatttctaatttagttctgatgatggtgatgataaaaaacttatggtataacacagagaaaggatccagcctaaatatccaggtgtcttgtggccactttattttagagcaggtctttattccccatttaccaccatgacttgtgtgttaactagatatgtttgcgaattggggaatatgttaagcaactccttataattaaaaagcatctttcaattattgtcactgttagtattttgtacacacctgtttacaagcagaagaacctggggcttttgaagataatatgtagtccttaatataacttaacactccactgactaggaaaaaaaaatctcttgtggtagcatatttcttgaaaataaaataactgcaatcatacattttcattttgtcactagcagtgtatctaacactatgaaataacaaccacactgtgacattgcagagaggatcctgggctgtttttagtgtggatgtcaagagtgatattctgtgtgttttgcattggtggtctgcatgcttagatatttctctaagtaaactcctctgaatctggtcaacagaaatagcaacctgcaattaccatgaatattttcagtaatccattcatgctcaccatctctgggcagcacatgatgattattttcaactagatggaatttgatttagattagtgtgcttactgattgaggcttgtctacattaacatggtcagaagaagctgcggtatggtatcttaagataacagaactgaagtactttttattagtttagtaggactatacaattgtacaactcttctattttttaataatatgagtacttttgtatgatgtattactaaattgggaaagagacttgaattatctgttaatgagtgcatggcttttgtttttatgtatatttttattttgatacatctttttatcaaatgtgtaaatgttttaaaatatttgtaaggcaggtttataaacatcttgttaataaagccagccaggcccttgcactttacgatttccaactgattgtggaaagtggttccaagacagagattgttctcttggatattgatgattaaggaggaaaaaatgaaatgtcatcctgtacattctcaggggcggaggacatttttttaaaccttggggtattttttgtttgtttttaaaaaataattgaatatatgataagatcaataaaagaaccaagaactttccatccttcttgtttttttttttctatttcaatccttatttcatagcaatcatttaggcttatttaatacttggaattttttatatccctttcgatgtattttaggtctagttttcttaatgcagtgcagcaaagtaagataagccagtttgggtggtcacttttctataaagtccttttgtagttcttcatagccttcagtaatttggactagctgagatctcttccctcacaaacttagaacgaggagatatgtgttaaagaaagcaagtcacagctccacatctatcatgcatgcatacagacatattagcaagcagacacccaaatggtttaaaacctgtccttttaagatcgcacaggccgttactctttatccttttaggctttctctagtaaacgtctagtaggaagtagaaaagaaactcaataaataagtaaaatatactgaatgatagatggtgataaatgctatggagaaaaataaagcagagaagggaaatagggagaatgtgtgcctttgcatttaaataggatggtctgagcaaatgtcattgcataggataccattgagtaagaactgatgttggtgatggttcaaggatgttggtgatggttcaagggccttacatattaaggggagaagcattacaaagagagctaacagcaaatgcaagagtcctgaggcagaagtgtgtctgaggtcagatgaggtcagataagtcataggccactttgtgtggggctttgactatgaggagctaatgatctattggaaggctttcagtagaggtaaaacatgatctgactttcaaaacaggatcattctggctgttgtgttgaggaaagagcagaatgacaagaggggaaggggagaccaggtaggaggctagtaataatctgatgagagaaggtggtgtggatcaaagtggtagcggtggaattagaagaagggattagattctgaactttaaaaaataataatttattgaagtgaaattcaggtaacataaaaataaccattttaatatgaacagtgtagtggcacttagtacattcacagtgttgagcaaccatacctctatctagttctaaaatgcttccatcacttcaaagtaaagagaaaacactctagtcattaagcattttccttctgatttcccttccctgtagcctcatacaccttttgcgactgacttctttcatttagcataatattttggagtttgttcatatactagcttgtattattaccctgttcttttgcactgctaaatgtattccattgtgtatatatctgtatacttttctgagttcctgttttctttggagtatatacctgggagtagaattgagggattgtatattaattttttctttaactttttgagcagctgtcaaattgttttccacagcaggtgaaccattttgcattcccactagcagtgtacaaggattccaatttctccacatactcatcaacacttgttatcttattttacatttattttgattgtatcctagtaggtgtgaaatggtacctcattgtggtttgatttgcattaatgactaacgatatttcatacctatatatatatataggtatatatatatatatcttgtttggagaaatgtctattcaaattgtttgttagctttttaaattgagttgtttacctttgtgtttttgagtcgtaagacttctttgtatattctggatactagatcgttgtcagatatatgatttacaaatattttctcccatttcacaggtgattgttttagtctttttgaactactataacaaaatccataaattgggtagcttataaacaatagaaacttacttctcacagttctacaggctgaggaatccaagatcaaagtgcttgcagattcagtgtctggtgagggcctgcttccttatagatggccatgttcacattgtaacctcacatggtagaagaggcaaggaatgtctctgggtcctcttctgtaagggcactaatctcattcataagtacagagccatcatgacctaatcacctcccacaaattccacctcctaatactatcacattgttgatgaggatttcaacatgtgaaatttagggggatacaaccattcagaccatagtacttgtctcttcactttcttggtaatttcctttgatgcacaaatgtttttaattttaatgaagttcaacctacctgttttttgtctggttactcttgcttttgatattgtatctaaaaatccattgcaaaatccaaggtcatgaagatttacccctatatttttttctaagagttgtatggttttaaaacactcatatttaggtaattgatctatttttaaaattgttgtgtatagtgttaggaagaggcctaatttcattctctgaatatgtttgaagatagagttgacaggatatgatggactgaatgtgtatgtgggagagaggaagggttcagggatgactacatgtggtgtttgagcactgtgaaggatgtgactgactgtgatagagaagatcgggagcttggtttgaatctgttgagatgaagatcagagatgtcaagaagacatttggatatgagtctggggttctgtggaaagggcttggctacagagttgggagtactcagtatacaaacagtaagtaaaaccttgacacagggtaataaaatcactgtggagctgaatgtgaggacgagaagcctaagaaagaaaaaacagtttaaatatcaagcctttgagaactgtagtgttaggaagttagagttaaggggagaaatggagactgagtaagagtgatcagtgaggtaggagaggaatcagtaggctgtgatgtcttagaaggtaagtgagggagtgtttcaaaggaaaggagtgatcatctgtgccaaatgctatggaagagtccactcagatgaggactgagaagtcaccattggatttagcaacatggaggcaactggtgttttagataaaaactcttcaggacaaggatcagaagcttgatttgagtgtgttcaacagtcaggtggagtctggaaactcagtttggatacagattgagttcttcattaaaagaaaaagaagaaattgggtggtagttggtaagagaagtggggtcaactgaggccatttgtttttgaagatgggagttacaatatgtttgtgtaatgaggtcaaagaatccagtggggagggaaaaagtgatggtgcagaagaggggagacacttactaagacaatatcagcgactaggctagagaaataagatcaaggaggttttaaaaatctgcgttttttaacacatcctgcagatgtttttatgtacctgcatttttagaaccactctaacacattttgttgagtcactcctaaaatggttaaaaactcttcattttgtcttgatgattttatgtcagcagaaggttttcttcacagaaatggcagagaggataaaaatgaaagccttgtggtgttcaatgatgtaaacagcattttcattgctgtagcatccttgacagatggttttccagtttctgcaagaatactactgtcactcccttcccccaaatgaggaggagatcactctcttaccaagtcttccccatctttggagtgctctcaccgttaaaaagtgattcaagtttaactgaagcataacgtttctaaaatttttacccactggtgactttggcgtcacacagagcaagcatatccttttttgctcggagggcattcattttattatttcttcatttgacaagtcatgttgaacggtgatcatgtggcaggcctttctcaaggaactgcgcaatagtggtcaacagacaagcaaaatccctgtagtaggaacttatgttccagagattcttcaaatacctgaacataatcaccttggctccttaaatctcctctgctgcaggctaaacatcaaacaatttcttcagtgatgtttgaggattcttgtttactcttctctttcaaataggggaaactgaggttccctccacaactgagctcaatacttcgtgggtcttgatacatggtactgaggcattcttcttgcctttgatgtagatgcgggacttctagtacagcccagaatggatttggcattatttatggctgcgtcattctgttggctcctgttaagtctgtggttaactaaaactcctgggtgtttttttcagacaaactgcttaccatcttacacttgtaaaattgatttttgaacataaatgttagaccttttggttgattttttttaaggtcctagcttcaacgttatctggagaccccactgacaacccaatcacgtaatggccctaggaattaatgccagtacttattttaaatcctcatttgaagaaaggggtatacaataaaatcgacaagttttagatgacataagctgtcaaattgatggagtaaaaccttcacacacacacacacacatccagacacacacacattctttaaataattaaatgaacaaaaattagtccatgaatttcagcctacagcaactttaagacacatgttaagactatattttaattcttggcctgtgattttcttaaaatagaattcttaatgccaggcaatggagaaaaggcctactgcagatatatgaaagtaacgggatttagatcattccagttatgactgctttagatctctcctgaaaaaagcatcttattctttttaacaaaaaaataaaaattatatatttctaagaatgtatttattttattaaagaacatctatagttgttaaggagtgtccatttcatcttgaggacttttatatcaataaagggttgtctcctaaacttatacaacatagaacaaagatcccttatggtgttcggacatttgagcacagttttttgtttttgtttttgtttttgtttttgtttttttgcctttaataccttcatgttttgaactgtgtctctgcaagagtctaaagtttgcttttttaattgttcattgttaaatcttttatagatcactctggttgggatttgctcacttataaggagaaagtcaccaacagcttgatctattatttttccctcttcaatgtggattaaggtctttttatggatgctttcctgtcattaaaaaatatgtatcctttagacttctttccaaatggaatcatctttgatgctaatatttatactctgtgttgtatgaagaataaaactaagagccccagccacttttgaagatgtgtgtctttacaccagggccagtctctgctgctcctccctgagagccagtcattctttgtaacaatgcattatttcacctgagttgaaggttttcattagtgtgaggaagtagcccttcaacatatggactcatcagattttaattgtactaacttttaaattgactgctaccttattctgtgctgtttatatgcctttatttttccagttcaacttttttttctagtgttctgtattaaaaagtgtaggaaataactcaaagtcctcatgttttaactcttctaacccaatagcattggttttcaaattttagagttcttaagagttattctggggaagcttgttaaaatgcagattcctgagccccaatccagagtttgagatctgggtcctaagaaatgtattttctcaagtgaattccgagtgattctggtagattattttctactatacttagatatttggtcttagcgtgtatttccacaacagaaatacagattatcttcagttatgttcactctgtttggatagtcaaccatattagtctagatggatttttggaggtgttgtactttggaggttataaattaagtcttctttcttgtcttttatatagaagtctactttatgtctttgggtagacattaccatcatctaaaacagatactgaagaaacctttattcatgttaacaattgatcagaacatgtctgtatacattattagtacatttttgtttgtttttaaatatttgaatatttatttcaccagatgctcaaataaggagatgagtaaactctgataaacgagtttaatgacaaattgcgacgaagattcttcactttacttgatggtaaaaaaaaaaaaaaaagattacagcaaagaacgtggcccataaactacttctcagttcattcctagacctgaaagctcctccttccttccttcattaaactgctgatgttatcatctgaccacagacatttttggcaaagaggaaacacctgataatactgcctttgattttcttctgacatcagctggccttcctgatgttcttgactttagttagcaacttgttgggttatattttgaaaccctataagtcagggccagttcattattactttgtctttcatttcagaagttaactttaaattaagtattctcagatttggcatgtattgtgcatttgagaaaatgttgataaggaaattctcaggttctgggaagtctttatattctgtacattcattcaacagatacttgttttatgttttgtgtaaggaagtaactatgtatttccttggaaaatgccagtgcccagctaacaattactagttgtggtagtggaaaaatatgcataatttgtggcaatcatttaaatttaaatgtctctttgtagaatttctgcatggttttcaaggcttaaaaaataatggaccaccttaatgaaatgaccagagaaaaatctcaacacagatgaatatttgtcctcctaatttctttgtgagattaaatctttcagattttcaccttatgcatatatgcaattattccttcagttcagtcactgagatctggtatggcatctttgttgacttgtcatctatattctattgatgcagaagacaaatttattaaagcatctctttgcatttatattgtaggaaaattgtcccttatgggataatctcacactaactactcaaactgataaacctaaggtatggtattttcactccactaatgattaacagattagtagagagtgtgaattctcaatcatattggtaccccattgtccaagttttagtagttttatatttaaatgtcctaagggtttaacccatctcaaacaacaattataatttattatttcctaagcaataattaaaaaataggaaatgaagaaaagatccattcttcatttggctgcctattggtagatcatctgtctggtcacatgtggacatttcagcaatgatacattgatatttgtaagagacactttacctttgccatttagattggttatttataaatgtattacatttgcatagcattttttacttcttgagcaatttcataaattctatttagctgtcccacaccctatgagtcaggtagaacagggggcatttctattttcacataatgctgagtccacggagctgaagtaattcacttagaatcatgagatgaatacgtatctgtacgcagtctggattattgtgttcgcacttctgtccactgtggagggccctttccctccagcccatgatgtcagtgcttctcagaacggctgcttctgatcgagccttttgggcaccttccgctttcccatcccctacatgccagtactcacttgcttatctgggtttttaaagtccatgttgctagtcagggtacacatcaattttcccatcctcttttcaagaatgatcacacaactttgcttggtttctctgaggtgtcagtaagtgcacacaggattcttctcaagttttggttgtgctgctgaacattttgtttgtttgtttttttgagacaagattttgctctgttccccaagctgcagtgcagtggtacgatcatggcttactgcaacctgaacctcttgggctcattccgttctctcatctcagcctcccaagtttgctgggactacaggcatgcaccaccatgcccagctaattttttaattttttgtagagacagggtttatgccatgttgcccagattggtcttgaactcctgagctgagcaatcttcccaccttggcctccccaagtgcggggattacaggtgtgagacaactagtctagctgctcaacatttttttttaaccctgacgggttctgagcaatttttagttcttttttgtgggggaaaggctgggggaaggggacaggtagttggtatcatcagccatcttcccagcatactttaagccacgaatgtcttctatttaagaaatataaattctttttttcttttttctgatctgtcactgctggagtgcagtggcacagtcttggctcactgaaacctctgcctcctgggttcaagtgattcttccgcctcagcctcccaagtcttttttttttttttttttttttgtaaatttagtcagaactgtagtaacaccattattgttcatggcagcctcaagctgaaggaattcttttactttagccgcctgagtagctgggactataggcgtgactcaccatgcctcgctaatttttaaatttttgttttagagatgaggtcttgctatgttgcccaggctggtctcaaactgctgggccccagccatcctcctgcttcggcctcccagagtgttgggattacagacgtgaaccactgtgcctggcccagaaatacattcctatgcatggtgatagaagacaaatgtagccatcatgaagcagcatcacggttttgcagtttacagtggccagcagttgattaggcacaaatacagatataaaaatataaatcttcttgtttgccccagaatacttgttgttaagagctagcatatgaaagcactagaaagcaacaaaaactgcacgcaaacaagagaattcatggctctataatgacaatagattttatttattaagcaacttatatatgccaagttctttttttttttttttttttttttgagacagagtctcgctctgtcacctaggctggagtgcagtggcgcaatctcggctcactgcaacctccgcctcccaggttcaagcgattctcctgcctcagcctcctgagtagctgggaccgcaggcacccacaccacacccggctaattttttgtatttttagtagagacggagtttcactgtgttagccaggatggtctcgatctcctgacctcacgatccacccgcctcggcctcccagagtgctcggattacaggcatgagccatcacgcccggccggccaagttcttattataaattttctttagtttttagccctgcaaaagtggtaatcctgtgttacagatatggaaattcagatgtaaacagttttaaagtgatttactgaaagcatatcattagcaaatggcctgtgggatttcctctcgtgttctttttgtgacataccatgctatctccataggatttgcctgaaaagtcaaagtaagtgaggaaccagatcagacaggtattgctgatttcaagaagggcagtttgaatggataaggaagagatatagataaggagaatgtgtgtgagattggtttgacatgggaggaagattttaattggagaatactccccccaaatctgaactatttggtgagactaagtcttgaggatgcttgagttgagtgccagagggagaattagaattggctgatagggtgcgagtcatctagacctatgcaggagaattaagcagttatggatttgggagaggatgataaggatgaagctgactgtaaaggccataagcagtctgtgaataacattttgtgtgaaatcagttgcataggggacactatggtggcctcccctgagattcattttttaaattagtgtttgggtatctgctccctgctgctcctgtgccatccatagctttaggaggggctaagtccacctctggttctagggatgaagcatcaaagtcctgttcctctgactgcagtggaacccctttggatcagtgagatcacatttagggaattgttgctccctcccacccgttgcctctgtcttttgcccccttccgtccttctctcctcacctccttccctttccctcagtggttctctcactccttgactggagaaagggaagccagtaatctcaagaatccttgtcaatcatccacttccaggcagagtggagagaaggaaagaaactggcccttaatgaaatcattgagctgctgaattaatataatccagaagcttttcctatccctgggcctccagtcacgttagctgataagcaccattgattgtgtaaggcagcgtgagatgagtttctgttccgtgcagtgagttgcatcctaactgatagtgggtttcactgaaggtctcagcaaggatgtgagcgcagactgcataactttgggggaatgagaggctggtgtacatggcgaaggccagaaaggggaagtatcaccttagagagaaataaaaggtgtttctttttgaacaaggggtccatactgctgtgctttttcaatgagcctgagaggaggtcacctttgtaaggcagggaccttgtcacatttgcccggtattcccaatgcctagcacaatgcctgacgagtcctggccttttgatactcattgatagattaaatgagtgtgaacacaagtttggatgtttattgagaaataagaaaataaggtgaaggggagtaatatctattgcagagaatagtatggaaatatttttaatgacatcgttaagtaatttagaaagatggaaatgggatgctagcttgcaaattagtggaaaatagtaggtaagatgaaattttaactgagctgtaggatcacactatttcaggccacacacacacacacacacacacaccacaaatgctttttgaacagtatcttctctcttttatccttaattttctccctctctcaaaatggaccaattttcttctaaatgtcttccataatattttggttttctcataaaaacataagatggagagtacaggaaaaaaatcaagggctttttctaggtcagatcttaatataaaatcaccactgcagtgattgatgttctgtgtgaagattctgtcaaatgttctgtaacttgcccagatgtgagggaaggtggtgtcaattaaaacccatgatgagcttgcactgagatctcgctacctctttactcctgtggcctctttttcccacaaagttggggtataacaattactcagagtgttagattattgaaaactgacagaatatttactatctgataatttttttttagttcctagcagttgtatgttttagtatttttgaaaaaaaatcaagatgatataattctaaatttgtgaatagaccagatgaaacttctaagggaattataactttcaaatactgaagaacttaaaatatcttttttgtcctttttggtgtaagttattttacgaacaaattatgtggtatttattggtcctacatggcatttgctctcttggatttttggaactgtttattggttatgtctggttagccgaggaaatggtgtaaggagctgtttttattaataaaaataaagattccattgaatggattagcgtgcgtgtccatgcatgtggtgtctgattctaaatttttaattaacttttgctttttcaagggtacctcatcaaaacttgggattgccaaaacttaataagtctcaccctcctatggaaatttagtcattttactactctagaccactttgaaagaggggttattgctctgacagtctaattccacttcagaaagtcttggcagcattacagccctctgtgcccctaaggaggtaacagaattttcaacttcagtcactggggacagagcccaaatcctctcccgcagggctccctggaagaggcctgctcagcagccatgcgcacatctggatgcgctccattttctcaggacttgtgccagtgaattctgtcttctgcatctcagctaggcttggtgccatggtttcacaggtgtctctgatttggagtggatatatacctatgtctttcagagcagtagttgtcagaatgttatgtcggaaatacattttacatcacgatactgcacttacatgtgtatttcacaagatgtgagacttacttttgactgtgatatactccattttccattccattcctttctaaattatagcaataatgcgttgctgtctgcactttgaaaagcatttcctcctccttgctttcttgggtggagggagtacttagcccctgagtctctcagaagtgtttctgtctttcctgcagcagtgtggacctctgatgaccagccaggacttgctcatgcccacagtccttcagttagtcctgagccaactacaaaatgatcacgatgcttctgactaatatttattgaaacctgtatcctagacatgaaaatgttttacgtgaattagtttctttatgctctacaatcatctgtgaggtacaggcatggtgattgtgtatctgttttacaaatggaaacggaagacaagagaggttcattattctgctaaggaagcagcagagcagggacactgtgcttaatgtcacattattgcaacagttctgctttggtggcctaataacgcttttcttatgtagttctagatgtcctaaaaatgaataataagaaagatctataaattatgtttactgggacatagacagtagagtcatttagttttttaaaatttaattaattaattaattgatttttggagataaatgtacgatcccagctcactgcagctgcagcctcctgagctcaagtgatcttcctgcctcagcctcctgagtagctgagactacagacatgcaaccaccacacccaactaattttttaattttttgtagagacagaagctcactatgttgtccaggctgttctcaaactcctggcctggagcaatcctcccaccttggcctgccagagttcttggattaccagtgtgagccacacagacccaatttttataagttatttatttgtattttccaagttgtagctaggcctagagtctaactgatattcatctgttttggaaatcgtaagctgggctttcattaaggaaaataaagttttgatattttggttcatgtttacctaatatatcaatgcaaactcctttcaaatattttttgacagcacaattaaagtgtgatggcttatattatagataggtttttatatgcaggtggttatgttttgtgagtttaaaattttacagctgtgatttaaaaataccagaatgatggaagtaaattttttcagagaaaaataatttagcattagcaatgcatcaccttttgactcaatggtattttgaaagacagattataattttcagtggagtagctattaaccagaagatcacacaaagcaattctaaggcctgtttgcatatatcaggggtaaaaattacttaacatacgatgcctaatgcttttgagtggactgggatatatctgaaaactatataggaaggtttgatgtacttagatcttatgggtgtggcctgttgttggttgcatctgaaagtagtttacatattgactttcaaatgtaagcaaaagagcaattcaaataggcctttggtttgtaccactggcatatctaccagaaaaaaataaataggatgcctgttgcctgtgtggccgagtgcatcctgtttgtgttttttgtgtcctgtggaaggtagcctcattaatcatggggttaatgctaaacccagcattcacttagctccttaattcatgaatgccactgaagcacattgaaacaaaactttaggtattacagttgaatagtcagactttttttttttttttgagacggggtcgtgccctgtttcccaggctggagtgcaatggcatgatcacggctgtctgcagccttgaccttctgagctcaatcagctcttctatctcagcctcccaagtagctgggactacaggcatgcccagctaattgtttgtttgttatttgtttttttgtagagacagggtttcgccatgttgtgcagattggtcttgaacttctgagatccgcctgctgaggcttcccaagtgctgggattaaggtgtgagtcaccgtgccctgtcagcagtcactagtttttgaacagtagccacatcattagaaataaatacacgtatatctgatattttaggtgcacagacaatattatattgtacacctagagttattgatgcagaatctgtgactttatgtaagtgatgagattatgagacttagccaaattgaacaagtttttcagaacataattctgtattctgatgtgacctatttcacttttactatacacttgaaaaactgacagggaattttatgatacacttttaaaaagtgtgatcatgagttaccatagactccattttgttgttagtggtatactaaccatattttaaccacttcctttaatcaaatatcctgggaatgtgggaggtgtcccaggatgacagccaacctgtcatgatcaatggatcatctgtttatctttttattgttatctaaactgtttgccactgagcattcttttaggatttctggttaatatttgataggttagctttgcaaaatatttgaccactgccattcttggccagtattacccatgtgctttgatacctgtgcacataaagcttcacaatatgttaaccatacaattagctgagtttatgtgtgtatataaaatgcaagaaatgtcacacatttgtgtccctttatgaaagagttttctatttgaattcgtcttgaaatagccttgaaggacttgtaggcacccctacctctagctgtaataaactctgtttttttctgatgtagttgtattcataagtatttgcaggtttttttttggtcatggcttaaattgctatattgtaatcagccttggtgctcagttaatagattttcttgttaaaaagtgaaatgagcattattttaggaacattaaataaaatcttaaatgtatttttgcctaggaaaattggcttgaccattgcgccacgataaggaaagtattttccctttgccgcagggccttgcgcttatggctgcgtcccaatttcagatagggctggaacagcctgtcactatggctaacagaattggaaaatttgctattattagggggaagcttataaattcccaagccactcagaagttgaatccatccactgaatccgtaactgctcctgtgggaactaggagaaaagccaggtagattttagtattatttcccctaaatcaggttggtggataggatgatttgacaattagtttttttttctacaaaagaaagtgatttcataaataacacaatactcatcatttttaaaaattaatacagtttttctccaagctgtcttccatttggtttctttatacacagcaggtagcatgtctttctcctgcttaagaactcatgcgtgggtccacagtgccttgaggaggaagtccacctgcctggccaagtgggacctttgggtctggctctggagcacccctccagcatctctgcctcatcatccctctggacattctagggtcacatggaacgcttccttattgatgcgtcccggctgcaccatgtgatcacattgtcatatcttttcatgttctggtctgtttctctggagactacttgtcccctctgtccacctttcaattttaggaagtcacttttccccaccagaccgatagttctgccaggatggcctatgtctcagtcacatctctatcttctgtgtcaagcacagcaccctcaatgaatgtttgaaacaaaaaatggatagcaggcactcactctctttatttaatagaaaattggagcaatttaccccaattatttttttcaaagttaattatttgtagatgagagattagaagccccctgaccttattttattatacttatgtaagtatatcaaatttgcatgaattccagataatgtctcggggttttagatgtattacttagcttaattagcatcacagccagttggagtggattttatgtatattttaaagggattcagtaaacagattgagaaaagctagggagtttgcacaagcacccaatgagtaaatagaagatgatgtattttttcaaaggccatatgccatctttcttaagctaggttatgttatgtgctatgttttaaataaatagttcactttgatttttggaagttttatgatgtagccatattaactgtcccccaccctgccccattaatctatttaagtgttattccatatatctatttggtaataatatatagcgaacagtcatgcatatctgtagttcatttttctcataatgatagcagtcttcaaaataacatttgattttaaagcatatacatctggatatttcctatagaataaataatctataaacttttaacaatctcatttttattaaatatcatgtttttctttaaatgtgaacccttgtccagcagttcaaagtattagataatgcaattgaccatagactcttttcctgtaaaaatactatacttgaggtaagctttcatatttctaaatttttatactattttcagttcaaaattaaggaaaatgatgaaaccaccttgtgtattttctacaccctaaaatatttcttaaatgtaaacttaacgcattttgtaatcaggagtactgatctctggattgtaaatgaaacctgagattaaccccttcagtttctttattgaaaactgagggtactaatgctgactgtcttacgtgcctgttagggtgcatacatgagttaatattataaagtgcttagaacaagctcagcacatagtaaatgctcagtaaatgctcattatgatgatttaggggtttttaacccaattttttcaaaatgaagcattttcttaaatcaagtgaatttacgcttaatgtttacatgtaaaacatgaatatgttagggtggataagtccattctcatagaacacattttttggattaggtttgccattttttccctccccaatacatttccacttcatcctggcttccttttttaaaagaaagtgaattttgaaaaaaaaatttttttttactccattccatctcctatctgcctttggaatcactgccagcagatattagtttttacattaggtattgctgtattaagcagcaacattgcttaatgtattattcatcctaggtactttgtaaatattgggtaagttatttaatgactgtgtaataatgtacaggcagtcccggcttacaatggttcaatttacagttcttgactttacagtgagtttcattggaatgtattcccaccagaagttgaggaccatctgtcatgagtttctgtcttcttgacctttagaggaaggaacttagaagttttctaatgtctcacgtactggaacgtaaattgtaaagtagaagtctgtcccctttccctgcccaactaaaaagtacgtaaggtctttgtgacagctgtagtcttctctgataaagtggacataaagatgttagcatttaaatcccacacagtttaaaaaataactcatatttgtgtctaatgctgttttcaaataattatcgtaaaatgtgagaaccaacccagtgaacaggcagcatgtactccatatcttgaaactgagaggcatagcaacttgctgaagataccacactgtacagctatttagtggccaaacccatatttggattgcattcaagcttgaattcagttcctgggctagagttttctccctcttgactggaaacaattactttatttgttttaagttgaaaagagttaagaaatagaaaaattaatgcagtggttgaatacaaaatcattgttttcttctcttttaaataccaagatatcgaagtagtagatcagagtacttaagtccttgaatgtgaaagactaggtggaaagccttttgggagatgttccagtggccaatatttagaaaaaacaactaggctttctttttgtttgttttaaaattgagaacgctttgaatgtgtaaaaatgggtgctaacagaaattgggaaacacatgcttggcctgtgttctgaaaaccaggataaaggggtgtggttttcctttttctgagataaaagcctgctgtaaattttggcagcaatattttattataataagatcaattcgcagcacattcaggcttattttgaatgagaattgagtttgactaaagaaaataatgtccttccaaatgaaaatgaaaatgagcagatgtacaaaatgaaccttaaaattaatcttggatttacccctccctgtatgcatcatttagcagtcagtgaaagtgatgagggtggggaagaaactgctgtgtagccttaaaaaaaaaatcactacaggcatattttcggggtttgaaggaaacaactgtgttagagactgagttgcttttctgcttagaaacatgcaaataaaatattcctcttttaaagatagttttacctttcacttgttactacatcattcttaaaattgagaaatctttgaatttaacataagttttatctcccccacctcccgccatcctgtaactgaatgctgtctattattttaatcatgttcatctactacttagtgtaaattgctgctctgtggctgcctgagaacaaaagtgctttcagttcttccttcttcagtgaaccagggcttcacatcatgcatggtcttgcaaacagttaggggtttagtctgagctgatcaataaattcagaaccctttatttagtgagatcgatacagtggaatgaagcctgtgcttcaattcccttccaagcatcactgccagggtaggaaggtgtctgtttttctttctaaagcacgatcaaaattatgtttgaggttttttcttatgagccaggatggagcaatgcatttgaaccccctccaaacaagcctgaaaagagcttgctcctgggttcatccaaaaacctatcctctctctagtaatgaagaatgagtgaacagaaatcatttgattcaagaaaggaaaattgagtattagcaaaataatgcttcagttaatatctgtgacttaatcacataagatgattgctgctaaatgattttgaataaaattcttcattttatgaaactacgcctgcaggttagcagcatgcttatcaaaaatacatggatcatcatagcatctgagaggtgatctgtcaactcttattttactacagatacatttgtatgcagcatgaataaaacactttggaatatattgtactttctttctgaattgttatgcttagttcaggatttgcttttagtgagacttttaagcagtttttatctttaaaaatatttatatatttggagtagtattttagactatttgggatatcagctttctaacacttgtatcaagataggcagaactgaggcctgaaaattgatctcttatataaaaagtgttaaaacacaatttgtcaccttgttggctaccatatcttaacatttttcacaaactttcatcatgatctaaaattgtctcgagattgttttttactagaaacatctatcttgataaaggttgtcctattaattagaaattactcatttttaatacatgactgttaaataattcatatgaggcccactggagaatttcttttagttactaagtgttttaagaaaatgtttatactcataggcaataagtgtttatattcgtaggcattaagagtgaagcacctctagtctgctaaaagagttgtgtttaagaaagtttgatggaatcaccttataaggtcgtgatttaaagagtttatttcttagtgttttataattagaaatcttcgtgctaacttgtttttccgttaaccatattttgtatgatcaaagactaatagaattctagacttggaaggaatttttcagattacatagcaccaccccactctttaccatggagtccaataattaataaaatgaaaaacccaacttagctaacttaatttatgttgactttgctaatagcgtaaaatgtgatttttgaaataccgaagattacaaaagccagtatgtaataatgagtagggaaaacaaaaagaaaactcctaggagaaaaaaggcagcacctgctgtgcacaaataccatagtacaacactgaatagaaatagtcttgctttccataagcttttcattaaaaaggggggttgtttgatacaaatacagacaatattagtagatccttgaaagactgattactttttgctgtggtggaggttgaaaaaggtttcctggagacatggcatctgagctaagccttaaaacataggtataaattagatgaagccaattgagatgttttgcttgacattttttgggcatatggtaccaggaagagaaaggagcctaaaactttcaaggttttgaatataagtaattagaagaatgcgagtaccaccaaatgaaatccagaggcaccaacaccatgtgtcaagagggagaagggaagaccaccctcattttctatcacctttagttctttctctaccgaaggaaatcattgcagttcccaaactctctgggctgtacagctttgtatgaatcacttactcatctcacctccaccgtcccattctgccctgctcacttcgctgcttggggtttttacaaaacccaggcaaagtatcacagctttgtgcacagccactgagacaggtgcttctatgctactggttcagacttttatcatctatcgcaccaatgtgagtgtggttttagtttatgggactacagtgtctgttttttttggtaaccctaatccccagcacacagtcaatacttagtagatgagtgttgaattgatgaaagtgataaagaatttgaattgttggaaaggtagctacagggaggacatccagagctggagattgggtctagctttgtggaagaagttagggaatctaatgcatgagagttggtgcagaatatagagaagagtaaagaaagctgaggcctgaattgtgggacccaaatgtagaggttaggggagaagtcagtaccacacaagctaaagacaaagaaaattccaagaattaaggaatgaccaaggagttagaatactgcagggaggccaagaaaaatgagacataatgaaaaggttgcattcagtgaatgggcagttttgaggccctttgagagtagtttaaatagagtggttgtgatgaaaatgcatgttcctttaagaaaacaatcacatgttttctcatgtcatttgtaatgatctcttggacaatttagtttatttaggtgttttctattgaccctaaacccctgggtaaccagaaggctaaggatttcttgcggtcatttttagttgattgaaagctggttactgggtaaaacatattctaagcactggatacttaatgtgaaaccgcacagaataacattagtgtttcactgtggtttccatggatttctgtatttgtccttgacttggaaggagcctatcaaatatcagcttttacagtgcctgtgagtagagtcagattccctaagtaaaatcttaacacctgtggccaaaggggctttctcttgagtagggctgaaacccttacctaagagtttaagatcattttcaaaggaaataaaaacaacaacaaacaacttaatagtgtgggtgatatctgtgtctaggggtgacccatgtgtgttgtgactgagtgtttcttcaatactgttctttcattcataggtttacaatgtagaataggatagatggggtcgatgaagttccataggttttctctctgacttgggcataaatcatgcctcccttttatatctgtgtgttttatagtactgttcatctgtcttctttattataggtttgacatatcttctaaatacatacagcgtgttcggccatgtaccattacaggaaatatcaattctggtcatgaatagacatatatttgttttatatctatgactatgtaatagcaaagtttttggagaaaactaagtgatgtatatattttatatatcaaaatatatggatatattattgaacatcctgtgatttctttagtcaagttctcagttggtcatattttaaaacatctggttgaatgacttgagaggaagttgaggaagtatcttggacctatcagcatgatgaaatgatatgccatctgaaaatggggcctatatgcatacatacaaaatatatatatatgacacacattatgacccatatgaatgtgcctgtgtgtgtagtttcaatcatgatgtgtgtatgtgtgtatgacagaatttagtcagagtacttagggataatttagacatagtggtttttgttcacttggtttattatgagttaggcaaaatgcagttttggctgtgtgaaacaggaaatagaaaaaacaataacttaaacaaggaagacgtttatttctctcacatgtaaccatttggaagctggcattccaggaaagatacgatgactttgttccatgaagtcatccagggatcccgattccttcattgtcatttggtcctcgtatagtattgccctcatttgcagtctgagatggccaacagtcaagttcactgtccaagcagcaggcaggcagagaatgccctcttctttttaaacgcatgacctggaaggtacacatatcacttacccatgtatcccattggtcagaggtttcttaaaaggcacagcaacctcatgggagacagagaaatgcactttttattgtgagtggcagtatgcccagctaaaacatctattactgtgggagaagacgagaatgaatattgggttacagtttcagtcctagggcacaatagaggtggtatatataaatagcagacatatattttctatatttgcattataattgatcagttgtagaatgtccactcaatattgctcaatattaaggcattattgaatgctttataaattatgcataaaacatctaaatttgcaaaacctgatgatctcaaattctagaattttaatctttaaggatctgattgtatgtagatgacaattactgatggagatctgtttgttttctagcaggttgtggtggtctgtgtctgattgcttcttgaacattattctattcacacattcgttttggctctttattaagctccccatatggtggtcctttgccaggctgtgcatgggatatacctgaatgggacacaggccctagcattaaggcatttacagttatgtttacatgcctatgaaaagcagtcctgacagtagtggctgtacctggtccgagtcacaggaaaagtttcccaaaggattcttcctccttgttcaagagtcttctttgcaccattttccctgaacataacccactttggacttggttgctgctgtggggagcattttttgaagactcaagttctttatgttccctggattgttcttttggttttgaactttccaatggattgtatagtaaccttttctgtggtatataggacatgtcagggagcaaggaaaataactttatttatgtctatttaattagagatttttcaggatttggaaagttattttttaacataacaaagtatacttttagctagtaattatatatgttgtttcctttcataagcagttcagagttcatattttcccatttaattagactgtaatttggggactttttagaatgaacaatcttaataaaaggctggttttgatataaaattagtggaatatgtcaataactactaaggtatacggcctaagtcttccttccttaggtgcactattttgtttttattcttaaaatccaaaacagtaaattttgctatgattcccatactgctcacaacctaaagtcagcgcacacacacacacacacacacactgaactaaatttaaaaacagactaattaaactgtaaatgcattataaaacaacaacaacaacaaagaacacttggctcacccagttttgtcttgctttgtgtcattctttttaatgagaactgtggaatttgttctttttaacaatattctttgaaaataggttgattattttctttgattatttaattgcattaaaatagtgaggatcaatattgatgttactaaaagtcatacataatagaagatggagcactttggctgtaaatgtgcagcagtgcatttgtggcaaaatcagcatttgttcctaattccttttttcctgttgcatttctgtcccctcacttcttactcttctttccatctcaaactgctctcggttctttaacacaggtgtatgtgaatattaattatcatagagataacttttgaaggattcggttttattgtatggatagaacatcattggggatatatttaaaaaaaaaaacagaactcagcagaaaaaaaggaaagtgtgtgttgccctaaacttgatgggagggtagataatatttaaataaggatgcagatggaacatcactgctctttgcttttatttttaataaattaagtcagatgaagcccttaagttctgatatatgaaaactcttaatatttttcccagggtggtgcatgtcatttagatgacaggtggcctaacatactagaaagagtaatagtctaggagtcaggcaacttgggattggggtttggctcagctgctaacttcattataaacttacctggtgtgtacgacctctgggtgccattttctcgtctgtaaattgcaggctttgcactacgtggttactgaaattactcttagatctgtgattatcattttactggccacttttgtcttaaaaccaatataaagtaaaacaaaaaatgagcatttttcaagagccaccttctgcaaagtgggatttgtgcacacatctgtataattcatcttcctttgaggctatgaacttttcttgatagtttaaactctttgtgaatctattttgtgacctagtgatcctaggctctggtgtctgtggtacagcatggagcctctttctactgtattgtaggagcacttaaaatctctgaaccagctcacaagtgaagctgttggtgtgtgcttggtgtaagcagccctaaccctagtgtatatgccacagcgtgggccaggtggccagcctggaagggatatctatgtcctgctagttgtgaacatttatccaagtcatatatttttcctttagccatattcccctgcaatcacatgtctggccatatggatttagtttatttaatttgagattggtatatccagtctcagttaatcttatttagagcaatttgtttttttacaagtatgtgagtggatgcctttttgtgtgccatggcatcccctttttgtggcagcaattttaatttaaagagaatattaaatagcagcataaaaatcagtaagataaagcaagccacttctcaaacttcaaaaattagaagatttatctcaaatacattgtaatttgtgagggaggaagagtacaaaaatcagatcgtgggcacatctgtaggagatgaggctgcttagtgaaccctactccgcctacaaaatttgagtaatctagttttttaaaagataaaatactgattcttctcccttcattactgagacaggtacttattatataaaacaagcagctattcctttagagtatgccagtgttaattctttcaggtagcaccggtatctttagtaaagctgggtcagttctctaagtcaggagttcacactttgaggcactcagaccttgagcattcattgtattacactgattctgtgctcaagatcaaagacaaacagggaaatgacaatcattagctggttttgtataaaaaccttgaatgtcagtgacctttggtatcatctggcttagtctacccttttgggagttgtttctaaaataggcacatccatggtcattcactctccactgaaaatcttgcagtgataactgacttcctattgaaatagtgatttcctcaagaaactttgctttgttctaagctaaaattcatgtggcttgactcaacatagtttataaaaggacactcaaaataatacctagagtctgaggagaaaatgtgctaaaacagtaaaatttaaaacatgattcaaaaatgtcacattattattttcgttgttacagatgcttgggcttcaaagcccagaaactgtttgattattaaactatcttgcctagtggcctctccctaacaagttgccttttttatatgccaggccatatggattgaaaagtaaaatttcaaaaaaaatacacctaccgaagacattaagccagggtttttcaacctcagcactgttggcattttgaaccagataattctttgatgtatagggtcgtcgttctgtgaattatagattgtttagcagcattcctgacctctacccattagaattcacaggtgtgacaaccgaagtttctccaaagattgccagattttaccagaagccaaaatcacccctggttgagaaccacttcattaaataaacaaatgattattatcactgtttaacatagaaaaatgtttgaatgaatgcttttccaagaaagaataacgtggcaaacttcaggtgacctaataaaaatgcagtgtaaaaacttcatgagatttactgaatttgcttgttttcttgatagctgtttgaaaaattcagaacagcatgagatgaagtagagtgcggatattccacgtgttctgtcacttaaaaaaaagtgtcgtaaaattcacatagacatgtttgtataaatggaagtcatcattttaattcagtttcctgactttggaataatcttggaaaattggaaagctggcccataataaattggttgtggtggttcctgtgtggttctggatgagggccgcagccatcttctgtctatcctcaggattgtgtagctgggggccctggtatcaggaatttctctgagcaagataccaggaaccagtggaagctttgtcaccagccagtaggagacagttgccctggcccatgtttgataatccttagggttgactggtttcacttctgctaagtcactggtggatgttgtggtggtcagcaccaggacagcacagtgattcacactgggatattcctgcatcttccagtttggagggtctggagaacaggggagtaactaaaacagtatgactcatgccccacttcccacaaggcattttttgtggaagtagttgctatgggcaatcccctgtgggcagaggaatctttgtcaggaatctctttcataaaaagctgcagcctcaacacctaccccaggagctagcgctctgagtaacgccaggtctttctggatatcagtttgtttcccaggctttaaggacaggttgaagactcctgccactccaaggttctcagcccactgaatttctgtaggcaagaaacgttctcctccctcttggagatcactggaacatgacttaggaacccctgttacacttagctggactgggcaagaaaacggttgagaacaacaaggagcctaacaatttttgacaaactgaatttaaaccttaaagctattcattgtaagacttttttttataatttttttttttgcattctgtaggcagcctacaatttagatggagaagaatacattcatttttttttaagaagatggacaggttgagtctaaggttgtagtgtgcctaaggtcatggcatattaataacagattctggatgtgaaaatttagaagccctataactaaaatctctcatgacttagtaacttaagtattttactgacaccgggtccagacaacgtcaactttgaactacagcttgatatgtgagtcattattaaaaaccacctttgactgctccatggcaaaggaatttaaaggagaagaacataatttaaatgaaactaaagcccattttattgctcatcaattgtcaggccaatttaggaaaaattcaagtataagtttaatccagatataaaatattgaatcacttttttttccgattggatatatgtttctgtttatatactgtttatatgaggaccaatagaaaaaatagtgtactgtgtgcatagaggcttggaatcaattggaagtactctaagatccagttctcttgccccatctaacatcttttttctttgaccaataatggttgtacatattcatgggctacatagagatatttctatacatataatgtatattgatcagatcaaagtaattagcatattcattagcacgcacaaacatttgtcatttgttttgttgggaatgttcagtgtcttccttctagctatttgaaactatgaaatattgttagtgtcatcctacagtgctatagaacactagaatttattcctcctatatagtcgtaattttgtatcctttaacaaatctctctctatccctccctccccagcctctagtatcctctcccacctaacatcttacttgttggaggatgccactactaaatactatgaaatctgatttcattccaaatgactgctcttgttttagatagtctttttcctttttctttctccagatactgtcatttttccttcacgatttttaaaaggaaaatgcatattttcattgtgcctcttgggagtttgtataaattactcagtcttttataaattactcagccttttatggagtgtaactttatatacattaagagtcatctttaaaagctcaaaggaatttatagcagtattgaatattccctgtctttttttcagagctaattctgttatttttttaaactatgtgtattttatacagtattccaaggaagaggattctgtaaaaatgcccatagtagtagaaatgttttggtcccatctcatcagctatgaagctatctaaatccaaatcattcttattttagttatgctaaatctacctcgccttcccttcttaggcagtggagaatatttgtgccacgtctttggtaaacatatttctttttttcatcatcttttttttttttttccttttgctggcttacctcagtatattgacacttctgcattccagatgattaactatgtaggtatttaaatgttctgttcaatatggtagccagtagccatatgtaactattgatcatttttaatgtggttgccttggattttgaagaccaagtaccaaaaaaagaatataaaatgtctccttttaaaatattgattatatattgaaatgataatattttggatatattgggttaaataaaatatgctattaaaatccattcacctgtttctttttacctttttaatctggctgctggaaactttcaaattacacttgcagcttacctcatacttccactgtcctaattcctatatagatgctttgcactatagtatccacattcagtgttttattcaaggtctgataaatatcagttgtattgaaaggagatttattatcatcatagtccacacatacttcccagtgcatttacctacccccctggcattcttaaattttagcaaagttgatttattttttcttattgttttgagtccacagatttggcctctttgattcctttttctgtgttgtctctgctgttgacttttcttcagtaagagaattaggatacactcttgcaaagcctgtatgccttgtttgcttgccagcctgtggaaataaggagccttagagtgtggctttgatctccactttgaagtaggtaaatctgctactctgaatgtgggcagggatcctcgggaaattgttgttgttgttgttgttgtttttctcttttcctgtaaaacaaggtttgaatgactaattagaagatatttataagagcctacatacttcatggtagtaaaggttattggcttattaaaaagatgatcatgagaactataatgtagttttaagaaactttcttttagaaaacctgcctgttaacttattttaagtgcgtttgaagttatgagtgaaattttacataaacttcacagccttttgctgaatccaccacctcggtgcctccttcaaaggaatttgagtcggcctctttactggccatttggtatcatctctgctgtgagccagacagaatctttttccactcattcagatcatggtgtggaattctgtgggcaagacatcactaacccattttaggacagtgaaaacagcaagtcagaaggttttattttggttcagtgaatttgcctgtgaccgtggagctaaaatatgaaacaaaccagctctggagacacagagtcttgcatttatagtgggggtgattagataagtggtctgctggtgacatggacgtgattcatgctctatctgctgatgactaaactttccaaatactttcagtgtactgatagtacatttcttaaatgctaaatatatctaactgttaacagctaattgtctgtcgggctcattgtctgttacccttaaatgctaaggtcagactgtccttctagttttgtagatagaagaatatgtgtggcagaggccagggaagaaaatctataaaaaatgagggtatacttgtaaaagtttgttagtttaaaattttgaaagtaattattttaactgcagtttaaactgtttacatttttttcttgttatttattcttattcagttcagaacagaatcatagaactttacatctgagaaaaaaaacttgaaagatcatgtgtttcaagctcttaatctttccctgttgcatattagtatactgggtttaaacaggtgaatgacattttcaatctttatgctaattgatagcatgggttaacgcaaaatttggcactctgacattgaggttgagtgttctttctgccagggtttgacttcactcaaaagtttcaggttgatcaagacatctgggaactcagtgttttgaatttcagagagccggcacctgcctctctgattctcagttcatttataaaatgctaggtcttggatagatcgtttctaagattatcgttttgctcccacaaattataggacggagtgctttccttctttttctttgatgtggacaacattcttacctcgaatacatgttttcagtcttttaaaaagccacttctgttccaaagttatgctaactaatattgaaaatccagatgaaatttcattgcttgggggtttgggattggggtcacgtatgcacgtgctacacccatgcctcgaaatatctctgtctaggtcagcaagtgggctccgggacagaggagaaggctgaggctaagctgcggaggctttgaggtttgataatagaagtcctcctctgttgttttcttccctggcagcatttgatttgcctctttccaatgcctgtaagtaggccaggggcgccactgcagactgggcttgggagtcgataggagagctgataagaactctctttttgcaacactgagcaagaaggcccatcttccatgactctgcacagaccgatggctggatgggcattttctttctttttcagcctctttcctttctcatgctaacctcatttagcttgatgtactccgagtcctgcttgatctagaagtggaccccggagagagcgtggcttggcgaagagaaccaacaatttagagaatagtggtttgggttctatagccatctttgtcctgtgcagctggatacctttggccacatcttaccacctctctttggcctccattgcagcctatatagatataggtgtctttttcatttgaattcttgttgcagtaaataacatattcactttagcaattacagtatgcattgatttcacgatcattaatttctttcttttagtggcaaaaagaaatcctcagtctacttttagtttcccaaaagcatctatattcatgatcccacttctcatgactcctgctattgcttaggtagattggcccagtagcttgcagaacagagtcgttatttcaggcatgaggaacaaaagcaaaggcttttgcaatgagaattggccattgctgtgtgcatttggccgcagtcaactgacttcttttcttggtctgtctgcattactccctttttcctaaatttgattctgactgaattcctggctgaagtggctgcagcagtctcttactcctggccttaactcagcatctcacaaagggctcaggttcattctcaagaaataatttatgcagtgaaagcatgtggctgacagagggtcccatgtagggagacactgttttgttatgttagtctttggctgcaactaaagcaaagcagaattaactacgggataatgctaaacagcggagataacagcagaggtccctgtatgtaattagtacagcatgagtgtgttctcatttcatgtgtttacatgggcaacaccaagttcttaattcagaaagggaataaactcctaagtgtgttgggttattgcctcttacctcagaaaaggacaccatatggccttgtatttgtatgctcttgccatgacaattccttctgtcaaaagtgattttctccaaaagtatggtatgtacattcttgggcagtcattcaaaaaaggaaaggaatagcctttgttaacccgcatttttgaaagtactattttggcatatgaaagaggaatcaataacactttatacatgctgacactatgtgctttttgttattgtaagaatctataatttcataaactgtaagaaaagctttcttcttgatcttcagattacctggacgtggaatttttaaaaaagagtttcatatacttaagtgttagagaaaagtgtcaagagatttttgacaccagttatttgtgaattcacctggaagctaagacttggttttgtcttgaatgatactgaaatttgcaataataaataattctccagtttttgagaataacagtgcagagtttcttatttgtatggttattccctatccagctcctcctattgtcttgtttctatgtattactataataatgtaacagaggtgtggccaaagaattcagctgtaagttttcattatgttcagtgaatcttcctctttaactaccgcatgaactgtgtaaggaggagaaaaactttactgtttacttccaacagtgtagggatgtaggaattcctccacttaaaattggagggcatttcatgttttgccacttctttgcaaattagtaaaacattttctgacataacagtgttaaacatttgttttaaacagaaaaagcttacttgtggtcacaggccagtctactaaaatacatttattttgcagcatagataccttgtttctatggaaaatattcttaatttgattggccattttaagcgtgaatattctctcttatttcttactagctccagtaataggagtttgtagatacagtatttaggtcattagcagcctaattattctcccatggcatggtggctgtggttcagatgctggtttaataagattaatcatgctgcttttagcactggagaaggcgctgttgtgttgtcaaagtatttaatgttcaacaggaacacagcctgttgaggtatgactaaacttgagttttatgattctgcctttcatgatttgccaggtaaatggaattctgcagagtaggagggaagagaggggaagtttttttatttatttagacacccttgcttctacgtgaggttaagaaaatttggggaaagctgtttctgtcttttttttttttttaggtacatctatgttttttgcaaagcacagtttacatctttaggaaatggctagtaacacctgataaagctctgcttaatgcaaaatagtatcacagaataaacttgaatttgtaattttgtaattgaaatttacatatattgagcatgcgcaaatgcattttggagacttagaataaacttgattttatgaaattcctcataaattggatgggttctgttacagggacacaaatgtgtctttgagcagctgcttgattaaaagctgagccccagtgtgtcagggtgagttagacttggccaggactcaagtgtatgtgattgcatttcatctatttgctatctcaacaaatggatcttttccttgagtatttgtagtttgtccttcagcaatgactagatataccaatgactgtagattccagtgaccagaaagagttaatgatgcttttctgtagaatgtttctcatagtagtttaaacatttatagatccaataagcaactgagagttttccacactttttcagatctttggaagttgtctccaaatcctgatccaaagcaaatgaggccatttatcttcccaggggtttccatgccctctcaacacctatctgttaatgggataagtaagggtagtttttacttcttgaaacctgcaggctatcaaatagagaggaaaaaaaaatgggaaggttactgtttcctctgtctaccaggttttattatggaaactgttcgccagataattgggtttaatttgtaacagaggggaagatttgtattgtaaacaagaaagttctttgaagataaatctcatcagtagctgttggaaggatactggaggaaactgtgaatgttttttaatggcctagaatgggagggtgtttttcttttttcttttttccttttcttttccgctagactacaaagtgttagcggggctagaaggtgataattggtagtcttcacctgattcctttttttttaaatggctaattaaaatgcataaaaccttccacttttttgtccccaaaggaaaacatactatttttgacatctgccttttttgacctgctgcactctttcctggtatgctctgtgttttattgactgcttctttatacagttgagaagagctctaatatgcttatttgtaacttttaaatattaggagaataagtcctacttgtaaatgtaaggtatgtaccagtatttatcagtgttatggcatacatattatactcctattaagtcatttatttggttctcgtattttctacattggactttttattatttagttttgcatcattttaagtgtcctcaggtatacagttttctatattacaatatatcacggattcaacagtttccattttaatatgcataccgtcatacactccatattctgtggtcacaccaactaattttttcaacattttaaacacagtattggtaggttttgagtttggagtattttagtttcactacagtactacagacttcactttaaagctgtaggtgtcttctttctttacataacaataatatattatttatattatatgtatattgtttcataaaggaaaagaaatttattagatctttgaaatgattaacgttgattttgtagtctgaaatggtgcgagaatttccagaaatattgctgcagtaaatggactatagtagtatattttagttttgcctgattttaattgtcaaacttgtggagtttttcagcttcactgttttcaagtttctcatcatctcacaaaatattcatggaattggtaatgaatgcccagttgtgtgtgtgagtatgtatttaatcagtgccagattaggttgtccctttgtatataattttgactttccttgcttatatctataataattttcactaaacatttgtgtaactaggtaaactgtaaaataattatctcatgatatctgtgacataaataatacaattagagatgctaaactgaaattataaattatacattattttaaagacttgaatttgatttcttttaaatgctcatacgtatttaccatcatatagtaaaaaggttttaaagaatagttaagacagaaacaaggtctattaaatgggacagaagtgctgaaatttacaaacagaaaagtagctcatcttgtggtcttcctcactgttcagtggttacatgtgacatcatatttttaaatcatacctagaaatttttaactgtactggataatgtttgtcttctttgatgataaagacaaaccatccatctgggaagaaacaaaaaaaaaaactctggtaagttgatgtccataacatagatataacactttttttttttttctttcttgaaatgcaatctcactctggcacccagactggagtgcagtagcgccatctcggctcactgcaaccgccgcctcccaggttcaagcgattctcctgcctcagcctcctgagtagctgggactacaggtgcacaccaccatgccctgctaatttttgtatttttaggaaagacaggtttttgccatgttggccaggctggtcttgaactcctgacctcagatgatccaccagccttgggctccccaagtgctgggattataggtgtaagccactgcacccggccagatataacactttcttatcccacatttgctaatggtgactgactactggcaggatattaaaattttcaagaatctcacattaactgcctgagcagagaacttgtgaataagcactgtgagttaagtaacatcttgaggatattaaagagaatgaattctactcaattcgtatctattacaacttctggttattgcttttacaataaatcctcaattaactaatctgcatagtagagaggtttttgtctggtaaattaagtcatgtagtttaccagaaacccattttaatgtgaagctttaatttcaaacatctttgtaagacgtattaggatactttggttattaagattctattaatgaatgtaattatattttaaattaagaactatacattgatgtgggtggatatttttctgaatttgaatttttatttttgagtttaaggtccatgacccagaaattagaggtgtgtgagaaaggtttactgaatgactgatataaatttgttgtcagtttgaactttccttctaggtttggagaaaaaataataataattttttaatttatgtataattgatatgttctgtttaattgagactgtattttttttctcatgaaaagcttattttgaaaatgatagcaggaatttggaagtattccagaactctgtaaaattcatagttaataatttgtttcattcagatttattttgattggcatgtgatccctatgttgtgttctgaattatctgaaatcacaacatcttgatagagtttgctctatttctgaattgttttaaatagtaactttaaaatttgcattaattgaaaggtaccttgtcacaacatttgctttgtgtcatggaaggttatctatatttggaagtaacattttggtaaaaggaagattatggaatatttatgaactttctctctcacagattcatagatttttagaacaggatggaactttagagcttttcaaccacaaccttctcaatttacagttgaaggaaatgagttccggaaagattaaatgacttgcccaaggacacacagctagaatagtataagaagggttgtgacccaagaaatctggctctagatcaagtgttttaccattgaaaattttcttcaataaacatgatataacatttctaaaaaaaaatcatggtatcaagctagacaggagtgaacttttacatatattttacatgtatttcattatggtgagtatctatctatctacaagtaaaattatcatccaagataatcatcttcattcacataattaattcacaaacagaattaagcataattcagtaggcgaaaaagcatttgattacctaaacatacatatagatggaacatatatctatctagatagaagatagatatatattacagatagatagatagatagatagatagatagatagatatgtatttgcatctatatgtatgtttaggtaatcaaatgtttttttgtctattgaattacatttaattctgtttgtgaattaatcatgagaatgaagatgattatcttggataaagataattttacttacacttctcacccatttttaggactattactccttaataagaatagctccataaaataatggaaaagcataagaattctatgtaaaacagttagtttgaattcttggattgcttcatggtttttaaaaaatatttgaagaaggagaaaaattaaatatctgtttgttatccttgatttcaagatatcaacagttacaacaatctccattttcctgttatcaaattttatgataaagaacaaatacctgtgcacttttaaatcattttgatttagtcagtttcttcagaagaaaagactttagggttcttttaatgaatatatggtaaatacttttatggtcataatatatgttagagaacctaaagaaatttttgataagagtgtttatagtagttcttcatcataagtctgttttagtaacaaaaatcaataacacaacctgctggaattaacactgattgttttcttggataggcagacaggaaaaagtcatagccagctggcatcaggaattactgcaagagctcaatgccactggccacagctggcagactttgccagaaaaagtggtgccccaacttctcctgggccagtggtattcatactgtgtcacccatttttctattgtagaaccaaaaaaaattaatagtatttaaaatttctggtgattttttttatgtgtatataaatatataatacaccatggaatactatgcagccatataaaagtatgagttcatgtcctttgcagggacatggatgaagctggaaaccatcattctgagcaaactaacacatgaacagaaaactagctaccgcatgttctcactcataagtgggaattgaataatgagaacacatgtatgcagggaggggaacatcacacactggggcctctcaggggatgggggctagggggatggatagcattaggagaaatacctaatgtagatgacgggttgatgggtgcagcaaaccaccatggcatgtgtatacctatgtaacaaacctgcacgttctgcagtgtatcccagaacttaaagtatatgtgtgtgtgtgtatatatgtgtgtgtgtgtgtgtgtatatatatacatactttatgtgtatatatatatatataaacatacttcatatatgtatactttatatatatacatactttatatatatgtactttatatatatacatcctttatatgtattttatatatatactttatatatataaaggagtttttatatatatactttatatatatataaaggagtttttatatatatactttatatatataaaggagtttttatatatatactttatatatatataaaggagtttttatatatgtactttatatatatataaaggagtttttatatatatactttatatatatataaaggagtttatatatatatataaggagtttattaattgggcataagtgttttatttacattacttcatttgtttcttcactgacagtttactgagtatcagcctactctgagtacctagtgttaagtaactagtgaaaacagagtattttttataggcaaataataggctttgattatttaaatcagcacagatatacgtaagaagtacttcacctgacttcaaatttaccccctaattttttttttcataatctgaaaccagttttaattgcagtgttagggattcctagatatttagcattgctcaccataaactgtagcctatttttatgctttatattttcttccaatttccatttcagtttctcagataagtactttgaaccactactgcccaccccttgccacctttcctcccacaaataagtcaagtaaataaggcctctcaatagcaataatttgctccaagccacaagataagttttaggattttgtatatttaatttacattaagtggctaaactcttgacttaaaaaggcaagggaataatttgcatattcattataaaataaataatctgctctgcaattgctctttcccaaggcaccaactactgtcagtcactactggatagtcagtgtgaaaagaaacctcttttcttgcacgtagtccatagctttgctcacagggctggatatatagaatcagaaagcaaggatatggataaggattgccttctgtgtttccagttaaaaaacaccagaacatttcaagaaatgattctgcagagatgggtcagaataccctcactgtgcttgaaattttcatttcttattaacaattctttaggcagtttgtagtcaatcaattccaaacacttgggatttcatttctccatttaatataatgaaaaaaaataagattttttctactaaaattaactcatgatttttgggtttacggagaatgtaatactttgtcccaaagagagggaggaaacagttatttttgctctgtcttctaactggaaaagtaggacacaggcaaatttctaggagacaaagtttctgctccatgattaaggtgagtggatacgacttgggcatttctttatgggtggctgtgggaaataggaacatgctttaacttctcaaccagcacattcctcgttttttttctcttgagcaatttgagaaataggaagagatgtaggcagagatggagagggcagagaaaaactgaaacaggtgcgcaagtggttaattttgcctttggtaggatattcactgtgaccaaagtggggtgtgtttgtagggtgaagtggtttttttctttcttatatttggaattcttaagcaatcaaggaaattagaagccctttcatgcttagggtagattctttttaatctattgtgtacctcaaactatgcaacttagtttcctggatggcagaaaagtttatgcttgtacttcaatcaatcctttttcttttttaaaactgatccacaagaacagctatttcagcaaacatagcattttgctcaaattaaattgcacataggtatgaaataagcttggtgagattaaattctgaaatgtgtgacgatgtatttgtttataaatcacaagtgtagttacagtcaagtccccaggtggcttttggagaaatataagtcaataaggtgctgttaaataaatgaatacaggtgcagatgactttgaaaggcaggagaattcaccactaacttcattatggcagatgaaaattaagttgtgtttagtcaggagagtcatataaatagctacaggggtcgtatgactgatactgctagggaggtagagtttttgtgtatactttaacatttgagggcatgggaaggtctgaaatactatactcttgaacaaaagttaagatacataaaatactaagtgggaagcaaactgctaaggtgttctagagccaatgcaactagaaagttatttaagccattaacatcaattctagtcattagcagtatctgtgttaaaggtaaaattttatgttttacgtgtttaaatcatcgtgtatactggatggtcagttctccactggggtgttcaagaaagtgtgtgttgagaacaaatatgaagggtcacaagttatataatactgataattgtttaaaagttttgcagaacttcacattttaaaagcatatgtcagagtgaattctaactcactcttttttatggtattagctattcagtgggataggaagatgtaatgtttcagctagtgagttgggcagtgtgcacattgcattgatgtggcccatagtgagttggttttatatatttacactaataactgtgaagattctattaattcgtttctttaagttccaacaaaaagttcttaggtttcattagaaattccttccaactttgggaatgcaatgtgtatgtgaataacataggattttcatggttgaaaaatctgcgaagctagactgaagaccacaggtaaactgtgccatacaccaggtttggagaaactcaggactcctctgacatgctcatgtatcctggtagcccagcatggtatactagccaaggttctccagagaaaccgagccataggattttctttctaaggaattagctcatgggattatggaatctgacaagatccaagatctgcaggttgagtcagcaagctggagacccaagagagctgatggtgtagtccaatctgaagggtggctggcttgacacttggcaagagccattgtttcagtttgagtctgatggcagaaaaaagctgatgttcgagttcaaaggcagtcaggtaggagttctctcttactcagaatagggtctgcttttgttcaactgattggttcaactggtcttcagctgattggatgaacctcacccacattaaagagagcaatctgttttattcagtctactgatttaactgttaatttcatcccaaaacacactcacagaaacacctagaataaagtttggccaaatacccaggcaccccatggcacagccacattgacccataaaattaaccgtcacatgtggtgtttatccagtgccccaaacagtactttgtaaacatcagtactcagtaaatattggatggatgggtggatggatggatgaatgctcatcatagaaattaaacaaacttaagttttcatatcatagataaaaaaaaacttctgtttttgctggttaaaaatgtataacttcacagatgtttgtctgaaatatagtaatatttgatcatcgtatttaatatttaggccactctaaaggtgatacctacctttgaaagtaagattttcaaaagagatcaaatatttttctatctgaaattgcacatgctttcacttgctatttgctttctctaatatcacactgtctctcaatttttcttatacttccatggccttgttttcttatcaaggtgtatttaatatttatatttaattttttatctttatatgtagtggttacctgctcttctccctaactccttttgggtttggttggttttgcccttactaaacttctttctagtggtttcttgccaattgtcatttttactgtgtagttataacattttatattttaattgatgtggaagtgttcagtgaagtcttgcaactggttagcagccatattagtgtgactacaaacataaaatgtaagatatgacatcattgttttggaaatgaattgtatcagctataaataacttgagtccattttctcttcatgtagtattatcaccacagaaagttaaagtcctcttgacctgcattctttttaactccttaaaattagatactgccaatggttaaggtaaatggttaatggcaaataactctcagtatcacaaactatttaacagtgtaagatagttcttaaaatataatgtaaacaccaaaattgtaaaggattttgttagtgttagttttcttcctataattcaaaagttagtaaatatttgcagtagataattagaataggtaatcagatatgtcatttttataagtaattgatgcatgataaatttaccttgaaacagcagatgagcaaaaagaaaataagtattacctgtaacacacttacttagttactccatggagagacttctgtttatagattacttaaatccatccagtttttcccctatgtatatatacagtcactcttccttatttgtgaagtccatatctgaaaattcacctattccttgagacttatttgtaacccccaattaatgtacatagcactgtcttggtcattggcagacacatgaagagtagcaaaaaatttgagtcagccagcacacactttcccacctgagaatgaacaagtagattctctgccttactatttcagtcctcagactctaaacaaatgtcctgtttgcagcctacttaatatcatgtttcctcatttgtgtgctttttgttggtgatttcactgtttaaaatggcccccatgtgtaggactgaagtgctgtctagtgttcctaagcacaggaaggctggatgtgcctcaccgagaaaatacgtgtagtcaataagttttgttcaggcatgagttatagtgctatcggccatgtggtcaatattaacaaatcaacagccaatgttaaataaggtgtctttaaacagaaatgcacataaaacaaggtattgatcagttgatgaaaatcttgtgaccagaggctcataggaacctaactttgcatttcttctaggagcagtggttcagcctttacaaattcagtgttttttggcaactttatggatcataactactgcaaatgataagaataactccagttattttattttttcaaaaattgagtttcctctttaatgcatttttcctaaatgatatattttaagttatttttcctgatcactagatcttcttcaatgtaattgtcatatctgtgtagcaatacagcatacagatgtgctattagtatatttactaaaagctcttttatagaccatttacaacttcccattccccaacattttgctattatataaaattctggaataaacatccttggcacttaatctttatcagatctatgattatttccttaggataaattttctgcaatgaaattttgggacacaggatatacaaattgaaacttttgctatttgcaagagtcctctatagtctttcaaatatgctgtttctttttctgaacaaaaggaaattaacaaaaaaactccattttatcaaaaattgaaaatctttttaggaacatgaaaaaattataaaacttatttttagctcttatttcaatggccatttatagtacatttttaaataatgcatttaagtagcaatgcatagtacagatgtccctcggtattctcagaggattggttccaggaacccctttggataccaaaatctgcagatgctcaaatctctgataaaaaatggcatagtatttgtatataagctatgtgcatcctcctgtatactttaagttatctctagattacttataatacacactatgtaaatactgtactttttgcaatattgttttcatttttttcaaatattttttgttagcagttggttgaatctgtggatgcagaatccatgggtactgtgggtcaactgtactttagaaatggacagaaatgcagattagatatgaatgcacttgcaagaacaaaatgctgggataatagacattagccactgcacccggctgtgagttccatttttttttttttttttaaaaaaaggaacaaaactccatagctgtatttcctttggaatattgtaaccatatgtgtgtaggaggactcagactgtgcatctccattttcaatccctttttggtctcttttttctagctttgaaacacaggtatctaaatttaagaaacacaaatacacattgattccttgtagacacagatgcagaagtgaagaaaggatactactttcttttatcctgcacatcagagcgggtacaccgtcagctacaagggagaccctgataatgcctcagggggactctaagcagagtgtactggaaatacagaggtaggagaaaatattacttgcggctgtgagaattggatggctgaatgaggtggcatgtgtgctagacattgaaagatggcttaaaattatcatgggagaaattatctactgctaaaaatttgcatattttcactacattggcagatttttaattttgatcttgctcaagtacggagcatgcttagcttgtcattattttaagcattgctgctacagaagagcaaatgttgatttatgctatttaagtcttatttacaaagtgcacgtggcatttcacattttttacatatcctcataacaaatttttgttttgtttatgcagtgccttcacgatcataaactattgagtacatgatattagattgtgtcaatacactttagtttgttaacattcttccctgatttgataattttggattttgcttcactttttgatttttacagataatgccaaataaacaacttaatgcttatagcttttttatttcttgtggtgtatttttggagaatgtgttcttaagagtggaattatatgaaactactttttttgttgttatgtattttcatattgcgttccagaaatgtgttactaattaatagtattctctaccatagttacttcatcattgtgtgttatgttaaaaaaaaaaaaaaagaacttgcctccttggcagccataaaatggcatctcaaggttgctttaatttatacatctttgattactagcatggaccaatctttttctaatattatttactattggaattttgacttgtgtaaaattgttcataatttttgcccaaatacttgcctggtaaagcctttcctttgtcacagtaaaggtcattccattctttcaggaatcattccaagttatatatgtttttatgtttgtaaaatttaaagtctgtaatatgtacttttacatacccagtggtattgagggaatagcacctcatactgttgggtttccacttggatccagacacgttaaggcataaaagcatgtctgaatcaccctcacagtgacctataaaggaaacagaactagtttaaactgcataattcccaaatagtttgttttctgatgttaggatgcaccataattcgtgctgtaacctttatgcctctctccagttttttcaggccctttctgtgttgctattgtaccttgtatgtattctccatttccattgaggaacttagtcattagtatgtggtaattctcttttctttcttttttttttttttttttgatggagttgcatcctattgcccaggctggagtacagtcacatgatctcagctcactgcaatctccacctaatgtgttcaagtgattctcctgcctcagcctccagagcagctgggaccactagcgtgtgccatcatgcacagctaatttttagtggcgatggggttttaccgtgttgccaaggctgatttcgaactcctgacctcaggtgatctgcccgccttggcctcccaaagtgctgggattacaggcatgagccaccacacccagcctgtaattaattattttttacctgcctgtgtccccttttctggatgcatcctgagcagtggaaccctgtagttagattctttttttttcaactttttatttattttttatttttattttatagagatgggatctcactatgttgcccaggcttgtcttgaacatctgacctcaagcaattctcccaccttgtccttctaaagttctgggatcataggcatgagccattgcacccgacccttttttttcttttaaattccacatgcctaactcacagcagtgcagtcactccttggcttgttcgttcatctagcaagcatttattagatgtctgaatactctccgaagctttattggacatggagcatatacatatgaaaaagccctggtacctgaagcctggccatttacaaggaggaaaaacttgagtccctagttaactgacagagtgtgaaaactgattttagagcttagaaggatcttaaggcactaaaaaatatgagtcaagacaccttattaaagcagcaatgaacagaaattgttggaaaacatatgttataacatgtcatataacatgttataaattctttaacatttatttccccccaatttataggttttgagttaaattggcctggcccattgaatccttgctttcattttttaaaaatgtgaagtctctgaaaggtagcatttagagtggggaggaactatagcagtaatttttttttttttttttttttttagacagagtctcactctgtcgcccaggctggagtgcagtggtgcgatctcggctcactgcaagctccgcttcccgggttcacgccattctcctgcctcagcctcctgagtagctgggactacaggcgcccgccaccacacctgtctaattttttgtgtttttagtagagacagggtttcaccatgttagccaggatggtctcgatctcctgaccttgtgatccgcccgcctcagcctcctaaagtgctgggattacaggcgtgagccaccgcacctggctttttttgttttgttttgtttttttaaggacagagtctaactctgtctcccaggctgtagtgcagtggtgtgaacttggctttctacaaactctgcctcccaagttcaagtaattctcgtgcctcagcctctgtagtagctgggactacagacttgcaccaccatgcctggctaatttttgtatttttttgtagaaacagagtttcaccatgatggccaggctggtctcgaactcctggcttcaagtgatccgcccaccttagcctcccaaagttttgagattacaggtgtgagccactacacctggccacaatcatctcttttaactcctcatttttatagttgaggaactccaaaacagttgcaacatccactaggctaactggggtttcttttaaagggagattatttcaaaattgtagaaggatatattttctcctaaatgtgatgaggaagtttattcacatatttgctcatttgagtctaagtttttaatgtgctccaagaataatttagattcattggtgtgtgggctatgggacgtgtccagtcgaatttgaggaccacctctgctcaggcaccccgctgtttcccttcattctgtgtagacctccaaacatgcctcagggagctgagaactgtgatattatatgtgtatgctcttcactttttaaaaagtaaaagtgaaatttacttttgaggtttagttatgattctctttgtgacaaagacatgtacaagttactactaggtttcaagttttagtttttcagtataatgtataaaagaatgaaatagaatatgtcgaggaaaatgtattaatcatttaactggctggcagtgatggtgatttttcgcaatgttttatctgaaccttatagctaaattttttgttggttttgagaacatcctaatgtgttttgttttgttttctttttttttttaactttgcttagactttaaaagataaagacattcatatcttaatcataccagacaaagctaaatagtatcttccatatgggagtcgaatggtgtaaagagtagaaagaaacctttgaaaatctatattattgattcccagaattttaaaaacaagttaggactcccatcttattcctttattacatggaaacagtcttttagttgagatgagggatcaggaagaagagactttacccagtatcttctaacttgggctttgtttttatttatctgattcagaggtttaaatattataatacttattgggggatattttcaactctctgaaatgccagattttgtgtgtgtatatatccatctatctgtatagctatatatgatttttttcttggagaaaagcttcacatagtcatcaattgtattttaaaaggtgttctttgagcaaaaatatgagtagtagcattgtttcaatcttttatgcagtacctactagatcgtgatgacttatgaaatgtccaaccgctctgttgccactatcctttttaataagtccttcggagggacagatgtgacaactcggtgttacctacatttgtgatttgctcaataatagaaaaatattcaaaatcattgtttgcctttgaaagagcacaaaatgtaaatgtagggggtggcataggctggaatattggtggattccatttggttgttaagaaagtaatttcttaatggacctcatccctcactgttaaaatagggggacagatgtgaagacttctacaattctgttgttttcctataatctcatttattttaagaaaggtaaataaaattagaaatatagtaatgtcatttgataccacctctgaattagggactttttcttgctgtggtttcttcaaagattttgccgtacaaaataatattatttaaaataatagtatatgttaatattttcaactgcagagtttttatggggcttttacaattttagattcttttcatccttttgttttttttttctctcttctaatcagtatttcattcctattccttgaaatagggtagcagaaggaattttgataattggattgagcaatttattacaatagtcttctgagggtgacaaacaaaattatgtgtgctacttttcctctgacttatttgtttcatttcataaataagcattttatatttatacatgaaggtaatcatttctttagtaaaggctaaggtgagacctgtattagtactgactattgttgatttggcatcatggtcagtaatttctctgccttctgaaggtctgcctttcttggcctttaagaagcaagactgtcattacatgttagactgagagaaggagacattatagagccacttggaaatgaagagttaatttttggttcgtaggtgtgttacaggctgaattgtgttcccttaaaattcatatgtcgaaatcctaaaccccagtatgtgatggtatttggagagaggatcttcatcaggtgggccctactccagtatcattggtgttcttaggacacaggcatacccagaggaaagaccacgtaaagagacagggagaagattgtctacaagccaagcagaaaggcctgcgaagaagccaactctgttaacaccttaatctcagacttgtagtttctagaattgtgagaatacacatttctattgtttaagccaggcagtctgtaatggcagccctagcaaactaatggcggtggtggggtggggggatgttccttaaacagtgattaaaatagctcagttaatcaaatgaaaagataagtttaccattttctttggaaacaaaatttgtattaatgtcattttcaaataactcctatgagaacgtcccaaagccattggtattttaattaattttccagtggtagcttcttcaaatagtaaatcagtaagttgtctttaaagtatcattttctgtgaagcttcaggaaacgtatactctaaaaaataatttgagttaatcatttagaattaactgctttattcccatcaaaatattgtctttgtcttctttgatggtaagagaaatgaataaggtttttttttcccactactttacaaaaacatacagagagaattgtgaaatatttaccagacagactgaaggacaaagtccactagctaactgaactaaagggaattaaatccaattcgttacagagtaggtgaaaggtatttaagtgtcagggggtgttttcattttcttcccatttctgaaagtaatttaagaacagaggggggaaatgagggattgaggagaaagtacagttttatcacctttgctctcaagttggtttgtgatccccagtgtcaatttctagtaggaaaaaaacaaaacaaaactttttgcaatcatatagttattacagaaaccagtgctcttaagtttactttcttcttttggcttcatagcagagtacatctagatcctttcattttgacaactttgtcctggaaaatatgagaaaatcagcctatgcaattaaatgcaaaatcaatgtaaactgcccggaggactagcatattaggtattatcttgtagagacaaatgctttttcagtcctcttgtgattcaaccactattggatatagaaatttaaggcttaatctctattatctcaatgttctacttgtaggcagagtgaaaaggaataaaaggattattttttcttccccaaaccagtaagatacatgttgtattagaaatattatactggcttctgggtatttgtaggctatgatggatacaacattcttcagtacaataaaagaaaatttgtcttttgccctgaagttatattttagctttcattgagttcttatctaccataaggttggaaagggagagcatttatagcattgccaccagtttgctggaatacagtacaagctactctaataaacatacacagagatgacttctgaattttgtagctaaaggagaattgtcatctgtggagggaagggtatgggtaacacctgagcagatgcttgtggacgctgcctggggggaagaagctgtagtcctcagtgttctcgctagccagtggtatgaccttggaagatagtgcagtcatttctggccctcatttgtgctgcaatgaggacatgaaggagatgggtgagatttttgcctttattgccttttaaaggcccttggaattattgtccaatacacaaatccatacgtcagccaatgccacacatttgtcactgtgagacaaattaatttagatgttattgagattactgtaatagacatgtatttaaaagcgtagtgaattcaaagtagtttataggcattgtcttagtcaacagatgcaaaaaagaacaattactaatatgtggggtccacatagctctgtgtttgtgtataattctgttttgtttataaattaaaaattgatacttatattcagaaaggaaaggaaccaccagactaattgatctccaagttctttgacatctgtggcatccaataattttttgtagttatgctaactacactttagtttctcatcagtgaaacctcatagatttactaaggatgtaataaaacagtttataagagcataattcacgtggatatggaagattctgtcaggtgaatatggatctgaagtgtggagagctctatcaggacaggaatcgggctctgtcctgtttacctctgtattcctggcactgttcacatacccagggtagcaggtgtccattaaatatttattgctaaatgcatctcttggaataagacctggtaaagagtactaattatgaatttggctaaccttactttctttaatcttgttttaagaaaaccagttacaggttggaccaattaggaaatgcataaattagatataaccatttgctttagaaaagattattggacttgaacaaaattgcaattgaaattgctttaaattacttaaataattcaaggacacttaaaatgtaactctatttacagactatcaatttatatgcaattttttgttaaaaaaatgattatggaaactagataacccgtatgtatagtaaggcataataaccctttaaaaatttccttctaggaaacactactgactgtaatgattaaaatgtgaagattttataattataatgtgaagaaatatatgtgattggttattataagttgtgactgaatattgttgtttgatttttctgttgtagttattatatagaaggaatttcattgtatttatcactcttttatttgaggtcctaaaatcttttttctagaaaattatcatttgatggtgtcctcatctggtagagagtcaaagatctaggtttggcatttaggtttttctgaagtttctgtatattggttctttattataagcaggcttttccagtgtgctagagttgaatgacatgtaaaggagacgtactcttgatgagctctgttcctcctctcttttctgttatacttctattcagttatgagaaagagcaaatgaatgaaactaaatcacagtgtgtaggcttttgtttccaaagctctttaagagtggctattttgtaaattatactaaagtgtaataatctagatattaatattttttcaagtcagatttgtttccccttgaattggcactgtagtctttttgtgacacccagcgtagaatttgtattttctctcctgatatgcaatatctgcctccactcatttcacactttggcttctttgtatggtgtctatcttttgctatgcatagaaggcccccagtttagcaacacttgacttgctgggaaggtggctgtcagggaacatgcccgcccccttaggaaccctttaaaacccctgcaggtgctgtgctagaaaccctcttcctctgtccacctcctttgggaggtgcctagctcaccagatgcctctcggacagacttacataggccccaggacatttcctccccatcaccttcagggtctgaaagccttcaagcacatgaggctgaaaggcaagattgcaagattccttgtgctgttaattcactctgctctaatttagaaagggtatctgagctaacttggagacatccaaatgattttcaatttaattcgaatgaaaaaaattatggttcaagtgtcagattgataaattaacattaaaactcatttgcgtgttcagggcttacgtatgttttatttctcacattagattttgagtatcaaggggcaaagactatgtctacagtgatttttgtttatatcttcaaaaatgtagttgactttatgagtatcaatatattccttccccaagaaaagtagaaaaagaaattatactttaatctgatgtgaaacagcctcctttttctttaccctgtttttgtcaatgtagtgttataaattagttgcttctcacccattaagcctgattaatcaaggtagtatttaattttctctgacttactgtctggtttaatattttcaccaagcagcctagttactgaagggtcatctttccatttgacaaatcaagtgtatctattgaggagcttgtctgtgtaaatttcacattcactccctctttgagggggaggaaaaaaatgaggcgggagagagtaaaaaaccgagtatctgtagtgtggtttgcctgtcctttataatacagctataatttcttggtcccagggctcccatcatgaaagtttggtcagccttattttttgttttgttttgttttgttttgttttgttttttattttcattcattctttttttgttttgttttgtttttcttttgagtggctgagcctctgaaatttggagcattggtgaatatgtgtgtcagtagaacatgatgacaagtgatattgccacagtatttttaatataacaatatcctatcaaaggaatacacatttggattttgaagtgtggagacaagggttatttttttttcttcttaacccaatgtaataaaaagcttggttgaagactgtcccaggagtaaaaacccagtttatctaactggtgtcatttcaggacggcacgatgccagtggagttcagcctctgcagtttgtttgtgttggcatgccgtcatgtatagagggcattttaaaatgctctggcataagagaggaagaagatgcttcaagtattttaacctggttactgctcccgttagaacatgtgcttttgctttctttaggcgggcttattgtgtttacatctttgtccctcatcatggtgtggggagaaccgctttatgctttatcatgcttctcttcacacagatgcacagccctttgtgtgttttgcatcaaacttgtctttcatcctgccttttgtatctttctcaaggaaattgatctcataaagaatgctatcaaattcatcaacaggcaaaagatagcatttcaaagtataagtaagagacatgaaaaggatgcagtcgtaagcttggctgtctcaacagagctgcttagcagaaaatattaaattcagcctgcctgccattcagtcactctgggcataactagccaaagaatttcacaatgtggataacctccagccctctgactgtatgcaaagtaggaggcctgaatgagagcattgtgttataaaaccttaaactggagcaagacttaaaaagcccaatctctctggttattttggacattcaaatgctgtctaagagaaaagaactcattatgactcagttccgttaattagacgtaaattaccatcttttgtctgatacaaaagaaggtaaagggaactctgcaagaccagaggatactgaaattctaatgagatgagagcataggctgaaactgagtgaaaacaagaagccattcaactagaggcaagcccctagtgtgtcttgtgtgtgagcaaaaagcaaaaacatacatttgtaattgtccagattcatatattatttagaaccatggtcagtgtccccagagagctcatagggtcctgatttttgacaggatatgatgctgacccacacagaaggaaatagtctcttttcccgagtacactctgaagatttttgttaggtacacagtctttctcagtgggagaccgtagtgtgattgaatgataaataaatggaccttttacttaaaaacaatgaaggcttaataaataaaggaaattagcaaagtttgaccgagagatttacggaactatacagtagtagaggaaatgtttaagcataacaataactgaataactatagagttctaatgttggaaaggactatagggtagttataacactggaaagccacttctttaggataataaaatagtataataatcctgttaatcccttctttagaacagtataaacacattttcttaattgtatcaacttctcaattgcaaactaggttgttccagagtgaatttagctgtactgttgctgcttgctagaaggttgacgttctcccttgtgttaggcgaaaattaacatggtctcaaaggtcttgtattctggtcactaaatgtcattccttttaaaaacaagtttataatacagtggtgagcatgattccagatggataatatttttattctcctttagagaagatgggtacagtggtagttaataacctgtgtcctgtggcgttatcatgtgattagttcacatgacctaaatactaattttgtaggaaattataatattgaaagtaattaatcatttcattcattcagcacattaagtacttactaagtcccaaacacagtgttttgcactagggattcaaggattaccgtgactctagggttgagaataggaatatagagtatgggaccagattgagaacaaagttgaagatttccatccgatgtgtgactttgagatgcttatggacatgacaatgtcagtcagtacaaagtaggtatttaaacatgattttctgaagatggaggttgaatcttggctagaaggtgcagatgtagcagtcaacagtggggagttgtttgttgatactatgtggtagtggttgcaaccatacaaggtgaatgagaagagccatgatatgggaatgatgccttggacagttaagatttgaggggcaggatggaaatgaggatactgaggtggaaaatcacgcgtgtgcagaggagcaggtgaacaagtagaatgcagtgcttgcggtcctgtgcttgctagctagggaagtgtcttttctcaatatatttgagttggaggagatagagagagtgtgtgtttgtggaagtgtaagagaaaagagacggagaaagagactgctaagtagagctgcgaacactaagataaggccggtggcgggaggaatgacccattttttaagtttatggctgtgtacaaggaaagcttaaagagaaaaattgaaaaaaggaaaggactgaggataatctgtctctctagaggaagtcagggtcaagaactcaattgggaagtaagtctccaacaggaggaggagttcagagttagggatgggtgtggctgtctatacgtataatatattttagatagaagagtagagtggggaattcagctttgaccagggctggtggccttcatcttttcaggagagcaggagataaatcacctgtgagttggtccagagcctagtgatgatctagaatagtctctgagggaattgagaaagagctgtaccaaggatagctaaaaaagttcattgttactggttaccagattaggatttaagtcatggattggaggagaagcacagcacaattttcccccagaagttttcagcttcctgcatctgaatgagagatcgtgctttgctgtattgatcccaagtttaggattttgctgggtggatgaggttgaaggaacaggtcaaagtggaagaaacagttgtttagctggcccataagctggtaagagcagtctggtacttttgatattttatgctgtgtgtgtgtgtgtgtatccttttttttttattttgcactgcatgttacttccaagtactattccctttctttgaaacagtgttaaaattggctttcttctgctatgtgacttggagaaaccaggtaaagaggaagattctctggccatttttcagaagcttgaccacagatgaagacaaataagcaactcctgaaatggtggtgactcttaactatttttgttattttgtactattttgtactgttgtatattctcataaaaacaaaatagcaaagaaacaataacatgaaataaggaaatcccttccctgctgtgttagagttcagtgacatttttagaggctctgccctgttggatttttcctcagtattgcttgcgagttctcaggcaaaataaaagtgatacgcactgcctgagtgattatttctaaaagctcagaggctaataggtatacggagaattaaataaatcagattcatgtatgccagctcctgtcaccaagtgttgtattgttgttgtttgttcatttgaatttgtcagacaaaagtcttcatggctgatttgcttactggctacccaggacagacttcagattatatgtgaaccaagttagacacagctctctaaatgcggcaaaattgctgtccactgagctcagagagaggtagaactcattaaaccaaaatacttaccctcccaccctcatgtgaaaatgtgaatgtgaggagttgctcacaagccaccatagtgttttctcaaaatactggattagaacagtgattgtcagccctggcctggggctaactagtcttatgtccatttgcctcagcagaaaaacatgaattcagtcaactatagggtgtatatttatattttcaatcgaccttaaaatccatcataccttttatgatcgaaagagcatattcacatcaaacttaagtaaggtatagggaactagtgtactaaatcttggcctgaatataaataagaaaaatctgtaggctagttcttattcagcaagttcttattcacaaagcaaactagctttgtgaccttagaaaagtcacgtacctctgggatgttagtttccttaatcataaaatgatctctaaggtctttttcaaattttaataattaattaaattgtacttcaaagatttttaaaacaatttctttcttgatgttttctattcagtccagtgtggtccaggtttttcctggcacaacagtgctatgatcagtctagctatccatgtttctattggatcaaagcctttcattttcttcttagttctgttttccaagtgatttttggctatttgtctattagtatcttcagcatagggtggactgggacaataaaatacaaaattcaggcaaggcactactgcaatcttggtctggtgctgaaaatgagtttcttggggggtattatctttagttatttaattatactatctgtgtctccagtagctaattgaaagaatagctctgcaaccagatcaacagcaacaagcatgttttaccaagtctctcccctaggaagtccataggcaggaaattgaatatcaacattcttttttgctcagttggcatcaactgttacttgcttttagggtaatcaaaaggtatttttaaactctgctactttcgttgactgtgaagaacagcaaaccctaaccctgttgtcacaggagggtgggaaagaaccttctagttggtacaatccagccttccaccagtgctgaaatacttttcttaagagatgatattaactcttgtctgtgggtattgacagcattttccttttctttttccatgtctcccaaataaggcattttttgaaagtatattttcattatattcaagaaaccacatctcaagttcaattaaggcagcaactatttaaggaacagctgtgtggtcataaaacaacatgtataatgcaccattttatgatctaatataaaataggattaatgaaatgataagaattgctttgtgtatctttgagcagtttgtaggaaaaaaatgtaaattaatttttgaatggggggtacctattaaaatctctgattggcaaaaatactcaagaacttgacctatttttgttaggctggccaatctttgttatgatgtctctagtgaaggaatgtatccatgcctataagtattatgttccctattatttatttatttagagtcttgctgtgttggccaggctgaagtacagttgtgtgatcatagctcactgcagcctcagtctccggggctcaagtgatcctcccacctcagcctccagagtaactgggaatgtaagtgtgagccactacactcagctaatcgtttaatttttttttttagagacaagagtctccatatatttcccaggccggtctctaactcctgggctcaagcagtcctcctgcctctgcttcccagaatggtgggagtacaggctgatgtcaatttaaacactttttagaaatcctaaattgactgtgatccttacaacaagaaaatattagatcagtcattttttcacaaaaagattctcagtagtttatagcaagattttacaaggctatgaacttaagcttggacttattatgtgacttgaagagctgacactgaaaaagatggtattcaaaagatgacgaggaaaatgctatactccttccttccttgccggcttatgttatataatttgatcagatgaaataccctgttctaaaatgtgtaacctttgataagcattattcacatatattttattaccttaatgctaacttatatatgaagttcagcagcctctgggctaaccgttaaaccattgtcaacttatgataatgctgcagcataagaaagggtcagttttataaatgcaacatcatcattattcagggaagtcttatggacagtcctgaagccagatggtattttatccatcaagcattgttacacataagtggaataatacaagtaattatgtatttgatttatatatggcaaaaatttacttttgttggatgtccaagaaatagatttataatatcatgacttgctaaatattttcagataaaatattacagctagtttataaaagacttttaaattagcctgtttgtaggggaatttcttataattttaaaacattttctaaaagttgctcttactgtctagctatcagtctgtttttttaaaaatggattttctcaggctttcaaggataaatgaattaatggtcagttattttgactagtgctttaggaagtgcttcagtgtatatgatgggatctgccctaaatggtatgaagtacagctagggagaatcactaacataagtaaacaatttcaaaaagcagtgataagctaaactcttaagagttaaaggaatccagaaaaggagagcttatcctgacctagatgaatgcatcacatcttgggctggatcttgaatgatgagactctgtgtaactaattcctgtggtgtacaggaagtcaggcaaggtcctttgcatatggttgagcctcacaggtgcctcttctcagatgaggaagccaagaccgagagtttaatcatttactcttgatcccatagctaggggctcagtgggctgcttgcttctgggcagagaagactttcaagatggaaggaaaggtgctgactcaggcacaactatgctttccagtagttaataggtgctaagtttataggaaatctgtatatcacaggaaatctggtgtaagcagaggcatgggcctttttcaattttgttaaatatttttctttgtattacaagccgttcacaagattgtatgtgaaggtggaatgttactgaggatccacggtgctcagtaatattagctgattgagtgaaggagtattgcatctttcccaatttactgtataattcttagtttggtcttttgtttaaatcttagcatgagcatgatttcacaaataagctgtaagcattatacaaacaaaataaatttaaactctgttaagatttatggtaatttatttcagcattttttgataatcaaaggtttccaggtttttttaagtatttctttttctgttgtcttatgctttgttaatttttgaaagacctagttattaaatttgggtgctgtcatctcacaacctcaaaatttagaaggcgaggcagctttatggcagaaacccattggaactgtaaacttgtgttttaacataatttctgtggaattttaatttctttttgaatgggaatagaggttctttcaaattgccttattaaataggaagtgaaaacatagatttctgaattctggtgttattcgtggttttcagatcattgctgtgaggcttcgggcttgtgttggatttcacaggtagtgaccttcctctttattgctaattctctctttgcccttaaagccagtgtcattttagtttttgctttgccctcagggtcttgtctttcctccaccttcaggtaaattaattaccagcacattcctgtttctcttttgaatatcagcactgtgtcttcttcctgaggaacctctcattagtcactgaaagctcctcagggtctctggatcatactctagtaatgctgttctggagaatttcaattcatgtgttaaatgttaagaaggtgtttttctggcctcatgtttccacttgctaaaattatattttgctgctttaaaaaattgctcataaaataatgggccatttctaaaaaaatcagttaagtccctatggtcacatgacacgttttctgagggggggtggaatttacctttaaaaagcagtgacccactacacatgctagaacaaagtgtccaccatagggcattaccgtgatgatgcagttccgtggttttaggacagtgtcctgcttaacagggctctccccttctcaggggcttgttggcttgcctctgatttgatagcagaactggaattgagaatctttaccccttaaaccattaaccgtaacatcaatttttgttttgccttggttttgttttaaaataaatttatcctgcaaaggaaaaaaatttcattcagtgggattatgaaacaaaactgtgatctcttaaaaagcagaataatttgcatcaagggaagacacttagctatagaataacaaataattggagagacccaaatacagctgcatatgtattctgattctttatagacaggactaagacccacacaggattgaaagtcatgtaaactttacactgtgctctattgtaaaatattaccttctgcatgtattacatcctaaaaattaatagagaaattaaagaaagcaatagaaaaaatgtttagagagcaagggtttttgtaatctgaagggaggatgagaaaaaacacttatcccattcatggatgatgatgagggggaattatgttttaccacagctttatcttgagaaatgatgataagcataggttggaattgtagacaatttagatggctaaatgttagacgattttactatcttattgagcaaatatttgctgaggatttactaagttgctaggtacagagttaaatgagaaacattcctgaagacttaaggaaccaacagcccattagtaaaacaagataagcagataatgacagttgaaagtaggctctactctgattagtgtgtggaggaatgaggttattattaatgtccagaggaaaaatccctttctaagttagcacgaatttgattgttcaaccaaatgtgaaataagcatgctcacagtggaagagtgagcagcacactttgtctgcataaatgactgggattaaactgctggggcgaggagtatagaaaactgttattgtgtggacatgttagggtcttaaaaggtaagtagaagtttttcagctagagaagggtatttcatgcaaaaaaaaaaaaaatcaatgtacaaatgcctgggtgcttggaggagcactgtattggaagggagaatttagtatagctggaatatcaaatatgagggagttgaggcaggcaggcaaggtcaggaagagccgacactgccactgttaggagttggtactttgtcctgaagtcagaaatagcgtcattgccctccatcgcctcagtatcctaatgagtcaccaactatggtctctgctgtcttaatctatctttagttaagttcctccccaacactctacctttcccattgctgaagttcagataccctattatttttatcaagacattgaggttaatgaatctccattttcgtttatatgtgtacatcactactttgcttatatatattaaatcatatagtgtttgcacagttccaggaggtcaacagctgattggggttctctcagcgctggaggatcctgtcagttaacctagagagttctgaggcacagaatgtatcttgagaagcatactctaaaattttaactttgaacttcattttcatgacaagcagaaatgcaaaaggaatgtaatctgtcctgcatgaaggacattttacaaatagtcagaatatattctgtgggagggatatcttttgatacaaagtttatgtccaactttgatgttgataaagctgtggtaaaaacacgtccttgcaatagccacagattcgatttggtatccagattttgcaaagcttaaatgttaatgatgttcacttttccttttctttcctttttttttttttttttttttttttttgagacagggtctcactctgttgcccaggctggagtgcagtgacgcaatctcagctcagtgcaacctccaactcccgggttcaagcaattctcctgcctcagcctcctgagtagctgggaatgtaggcacacgctgccacacccgcctaatttttgtatttttggcagagacggggtttcaccatgttggccaggctggtctcaaaatcctgacctcaagtgttccgcctgcctcagcctcccaaactggtgggattacaggcgtgagccactgtgcctggccctcactatttctttttctttgggaataggatacgtgttttgcagtttgttttcattttttctgcttagtcctctattttggaggacttttagagttaaaaaatgatgacatttctgggatttcagaccacactgacagatgccttggtctaacatatgcaggaatgttgaatgttcttgcactgattatttttcttattaaaggatttcattcagtcttattttaatttctgatccggtaacatcttcctttgtaaattttcatgttgttcgtttaggagattctgtgaatctttgatgtacttcattatttgactgttaactccaaagattatgatttctgcttacaaccttctgattgtaaacaagcagaatactatgccattactcagtagttggcttttaccagttttagtaggcttaaaacagcaagcagtgtggccagtgttccagacaacagtaactatttaaaataggaaaggcaaaattaacatttattaccaatttggctgtttgatgaaaattgtttagtacccacttttccttccctggtactaaagtagaagatgaataggtgcttccatagttgatgatgactaatgattaagataattatgctaatgataaaggcaaatttttatcaaggcaagtgacagctactatatagagtatttcctatgcattatagcatttaattttcatactcttttgcttttccatctatcagatttgcagagttattttatttggttataattttgtgagagatctgataaattaatccacacatttcctgaaaacaatgtttctcaagcttgataaatgaaaagggcctcctcattgttcaattgaacagtgagaacacttggacacaggaaggggaacatcacacaccggggcctgtcgtcgggtggggggaggggggagggaaagcattaggagatatacctaatgtaaatgatgagttaatgggtgcagcacatgaaaatggcacatgtatacatatgtaacaaacctgcacattttgcacatgtaccctagaacttaaagtataatttaaaaaaaggaaaaaaaactgtatctaaaatgttaaaaaattattgagcaattatcatatgcaagtcactgtgctaaaacctttatatgaattaaatcatataatcatcacagtgattataaggggcatatattatttcccccagatgtgagtctctatctaacagattagaatataagtctcagtgaagtaaagtgccttgctcaagtacatccagctagcaaatagtaaggccgggataagaaaacaatctgactttaaagattgtgcaacaaacaagacatcagcaggtaacaaaatgttagtctagaaaaataaaataaaatagtaattggtctgggaggaagcctgaacttgaaagtgacatctacccttggttctgctgtatgaatctgaacaaatcatatcacttatctaaacttgctacataaagaaggctggatttttgtgagtctatgaaaggtacctcattccattttaaagctttgatgctaggggcagaatggattgctaaagaagatggtgtgatctggctgctagtaatatcacaaataacaacagctcgtatgatgaaatgatatttggaattgaccactgtgttcaattcttacttaccctatctcccttggtagggtaaataagaagaattaccattctttctgtattcctcatcccaaagcaagtttttagatcagaaccagagtaccgtatgagaaattctttgttgttcaatttaaagatctgtggtcaaggtgttaagagcaagagatctggtccttcccttgactatctgaaggttccacagtaaagcagataggcagagatagagtctacaaagggagaatgctgactcattgggagcaaatgtcctgcagctgctagtgccagggagcagcacaaagccacggaagggctttctgggataccagccttttctgtttgagaaagcactgtgcatcgcttggaaaattagatgacccttctcactgtagcctgatgaggatgacctgctgacaatatctagatcattgcccattgcccagcaacatgtcagttccctgtttgttcatcccatggagaccttttccacccattttcaatagttcagagcactcttaagcctctggaatcgggtgtgtggccctggaaatagaaggatgagtcttgctagggcacagaactggaccagagaaactgaagctctattaggagctcagacacgggtgggacacacctcccacactcctgctatctagcactctgtgcactcatattgtatgcatcccttgagatgtatgtgatcccatatggactctggacatacctctatcacagcactttttactttatgtgctttcttcccatagaatgtgggctgcttcagagaactatttgtgtcttacttcatgttgtatctgtagaactcagtatagtcactagaataaaggtgctgaaagaaaataacaaaactatagaatgagtgaataaactctattaataggatactctgttaacagatgaggaaattgaagcccaaagaagatgtgaattgccccacagtggctaatttgagtcaaagaatgtccagaatctcaaatatatgattccctttccaatactcattttttgacacactgttaactcagtgtgttaacagtgaggtcagttaaattgttctaatttatactcttatttttacttcacaagtttctcaattctgaaatatggcagaatttgacaagatttttttttaatgattaggctgaaccccataatttttagccaagaattctcgaaaccagatggagaaagctgttcaacaaagatgaataaaaagatttaaatagttaaaaaaaaaaaagggcctcctttagttaggagttaaattatattatgataattataaacatgtaaaatataaaactagttaagcctttactataatatatggctcataagttttaaaagcaaaataattttaaacacacccaaaaaaactaaagacccgtccgggcgtggtggctcatgcctgtaatcctagcactttgggaggctgatgcgggtggatcacttgaggtcaggagttgaaaaccagcctgaccaacatggtgaaacccatctctactaaaaatacaaaacaaaaactaaagacccattaaaactggaattagagagttaatttaatgtcgtggatagtaatgttttattaaaaataacattgcacagttatgctggtggcttcagcattctcatgtatgcatgtgtcatgacagctgagttcctcactgctttccttattcaaactagctgaggccttcatacagcaaggaatggcctcatttgatctttgcttgagaagtgagtgtcatccacatattaagttcacctttacatgactactttgtacctctttgttcatgtaaatacaagttgtcattaagtatttttgttaacttcaaaaattattatatgaataaaaaccaaaaattaattttaaaaattcttgcagagaatttgtagtctctcagaattttttgggcaaatcttcctgcttcccaccacctctgacgtgctaatgatattaatacaatgtaaataacaagatagtgaatggctaaacactgtgctgagccctttgtatgcattatctcatcgaatcttgcagcaaccccaggagcaaggttgtctggttaacacttttttgcagataaggctagtggacctcgggcatattaagtaaatgcctcccaaggtcacatggctagtagaatatcaaactgattttgaacacagatattctcactccagagcctgtaacacccccactagtagcttgattactttgtcagttcaataaatgtgtttaacatatctgtttaccaggtaccagtccaaatgcttctcatacatcatcatctttacaataatctcagcagagtagattctatcatctgcctttagtaagctaagagggctcaaggtcacccttttagtaacactatccccccaccttaagagatgtaaaaatgtaaagactcattgtaagggacagttttaaaagcagaatttaaaatagtatctttattttctatatcttcaaggtttgatttacaatttgcaaggaaaaaacaatcaactaagagatcctatctttatattgattttttaaaaatagaaactcaaaaaatgtcattagaacttgaacccgtttaagctttttaaaggccctcattgtatgggaaccttgacaatggatatgaaataaataccttgtgaaatgaacttctctacattgaaaacatgttgggccagtaaattttttggcaaatttatcgatgtagtaaatatttcatttactaatagggctatttggaagaagatttgtttacactagagaactgaaggaaatgtaatccaaattactggcatgatgattctcattggtattcttgcagtatcctctgtattatgtgcatctataaaatgattatattttgaaaaaaaaaattctgtgccaccgtctatgtaatttatgtgacattattgacagttggtattctgacagctaagacagtaatagggatgctagatgagtatgtatgtgtgagtatatatgtgtgtatatagatctacacatacaataaaggtgtgtgtgtaacccatgactccaactagggtttatatacttttgaacattgatagatttttattttgaacatatgttgtcgctttcatgttcaaatactactctttgcgtaaagcagaaattattgctttgtgtataaacaactaaggttattttgttgattacttttgtttgaaaaataaagcattggaataggaagtacatcataaagctcagaaagccttcctgtgttttatgtaaaagttgtatggaaaatttttagttggtttttagtctctattatttggacatgatgttctaacctactttattattcagaactcttaattggttacttgctgcattgtagaggatacaagtgtttaacagagtccatgacctgaaggaactagtgggacagatagttaacaagtgcatgattacagatggtggtaaggaaaaggacagagaacaactatgccaggtgggatcttccgggttgagtaggcctgtcgaaggggataggaggcactgaagaggaaagacagagccacatgaatacaggcgctccagtgcaggacaagcacagcactgcttagaagctggaaggcatgtggtatggcggtcacataaggctagtgttgtggacaggtaggtgattaggaaagggctttttatggcatataaagaaaattcatccagggtgcctaggaacacacccatacccaagagagaggtagaagagactgataaggaaaacgcacgaaaatgggagaggagaaggagagaatgagaacctgatagttggggacaaggtgcatggggagagggagtttcaaggcagagagaataagtgattctctgtcaaacattgctatgttttgacaagaattctatagaatcattgactttagtaattaggcttaagctgtcattggtgaccttatcaagagcaatgtcattatctctattgtaacttgagttcctaggatcttcgaagagtaattgtatcattaaaagtcgcataaacctcgtcatttttttctgatggaactatcctaggcatattattgctacctttagggttaatagtgtaatccctaagtgtgaaaagaaaccaaacttgggttagaaggaagctcgaagggagagaaagcattactcaagctactgcaaggaaatggatagtggacataggctcatctagaatacttaagtgacagtatttatcttaagtagcttagaaacaaaattactgggttgctgattaagaaaatgcatgccaacttgtcagaatgccagtggtttgttaattatttagcaataaaataggtttaattctttcctgctttctggctaatggggagatgagaaatggaggaagggggaaaaggtctgacttgtgcagtcctgggaaggcaaaaatcagccttctgtcctcagtgctctgatgatggtgtgacagttacggacagaatgtccctcccactagccttctctactgcctgcattcacttacccttttcctgcttgacttcctgcttcatctccaaggagcagagagtgaccttctgactagtacgcacctgcatttttgctcagcagcacttattagtctgtccctttaggaaccggcacatacgtattttcccaactcttcctcttactcaaaagaaggggaaaaagagagagagaaagggagggagcaaaaattggcagaaaaccgtgaaagaaaatgagtttgacagatttttcagttctggatgtctgtcttcctgtttcctaaatctgtcagaaaagctaagaccctgccccaacaaagaataaaatccccaaggccactctctgaaaagaggggagatacacatcattctttccccaaattatcagaaggagatccatgcaggcagaaccgagacacaaatcattatctccaaattattggtatgaaatcatatcaatgcttggggctttaaaatgggtgggctgatgtggagaagaaaaaaaattgaaaaacagaatgtctcctaaataataaataagtaaaatcgaattgtaatttaattcgaatcctaccactgatggattgctcatgattcgtggtgtgacatgatgtgttgtttaccatttcctgacatgctgccttactacctctttgtctcccctacatttatcttgtgacatttaactacttgtttacactttgttgtccccagttacaccatgagctctgtgagggctgggagtgggcatactgccttcacagtgcccaactcacagcaggtattccagaaggctttgtcgtctggtttagtgaagcgtccagcccaggaatggaggacaggctagttgtatgtattcccttctcagatgcattagcttggcagtttggtcggcatcctctccctgtctcctttttgtgttggtcgattatagtctcatgctacaggagacaacctggtgccatggaatgagagcatctgatttggaatcagtgacataccagtgcaaatcccacctctgctccttagcaactactttctcaagctttagcagctaaaacagggataattatacctatctcatagggttgtaatatggttcagatgagataataactgtgaaagcactttacaaattataaaggtggtagttgtagttgaacttgtaaggtggaataacagtagttgaaaatactatactttctatgcaactttttactcttggcaaacttccttatgtagacagggtggtataactatcagtttaccatatgttttcttgacctacagaattccagctctcttctaagccgtgttcccaaatcacatcccaattttcaccctatctatgattctgtgaagattggattaactgtctggttagttgccgtgtttcctagtctattgattcgcctctgcctactaggcttcttatggaggtcgatacactggaggccttaaagtggactttaactttatcacgttattttggttgagggttgggaggagcctacttgcattacatttttatggcattctcagggaaatggtaccttgaggggagtttctgatggggtggaagtttaaacaaccagttcccaagatgcctccagaaaagttgcaatgtcagctctgaatgcagctcagggtcattatggtggtgactccatctcccacataaaatatggtagatgccttaatgtgtcccgcattctggtggggcagctaattctctcagtgtgtgcttataacacaggtatcaaacaagtctgggagagcccaaggactgcatcctgataatatatagatgagatagtaaatgttctcttttatttttaagatctgagggaggaatgtttaaggtaatccacctgaaaaaggctaaggtaccctggaaagcaatgttaatgtgaattggttgtcaccaagtctgttggttctgggtacttgaaagttggaatgaaacaaaacatgggattactattatagaaagacttcaaaatgaggagggtagttcctctggaagatagaaatttgtcatcctttgagccagagtgataatggcaagttcagaataaaattgattattttttccacttacagaataatcatatagacctttttagattgttgcctcaaacaaattttgaagaaccatgtcaaattctacataaacaaaccaaggaaaggttggcattagtgtgatcacatttccaaaactgaaaatactgtcatataaagataggtgtaaaactttgtgcacaagttgtgaaataatgtgcatctttactttgtcaagtttactataattttcaaagtggttgagatgaattaattttcatattccacttcatagagtaaacagaaatacctttcattccttgttatgtttagtctggaattaagggggaactccaggaatatggcccctgtataatatgtgacaacattgtgtttttctgttttccaaaaatagcaaaagagaaagaataaagatggtttattatgtggtagagacttgtcctctatgtaatctaaggtttttatgttattaaatagattgaagattgaatagcttttcaaatgcacactccctatcgggttgtatctaaaatagcatgggatctaattcaccttaatgagttagttcttgactctgtatatcttcttcagcaagaagggatttcatgtcaaccttcttaaaaccaagtgtactcttaaatctgctagcactgcgtgatggttgctaatgttattatttttatatgtgaacatcaagtgtcaatagtctcgaacaaggctcagtgaagctcttttggtcatactgttaatacatcttccacttttaatacagaatatctgcattataagctgtatgagtaaattcagtttatttttaatttgttgatgttttgtactagctaggaacatttattcatgtattccatctcagaatgttcaaagtagtgttgatagtgacatgagtgtttgtgtgtgtgtttgttaacttaacctttgagcttcagcagtgcgtactgacaagttcttagatttagactgtttggcacctttgtatttatatttatagatagccattgttcatgctaataatgttgagaccttataactagcagctctgacatttttatttcttcttttactgttcactttccaagtctgaaaagctgtttgaaatggtttggggatcggggatcttctctttgctctttcgcatctactccttgcttcaggaggctgatttgtatggactcagcggtgggatcctcccttgtgtttcggaaggatttgccagtgagagccttggcagaattggagggagggaagaggggaggatcaggatatttattattctgtttttctccctatggagtggttttacactggtgtcactgtactacatttggagttttattcagctttattttgataattcttacattgcattataaacatcagtttctaaatagttaaaactttacactcagaaatagtcttgtctcattataactagataatttatcattatagaaatgagaaaatttgaggcccacataagatgatataccttacttaagaatattaaaacttgaccctaagggacattcaatacttttgaccatggtcttgaacacaaagtaaattattttactttgaggagatggtgctttatatgccttgattggatgaatatttttagtcaacaaagtaaaacaaaataagagatactgtttaaaaaaatgaatcaattggaaacaacccaaatgcccatcagctaatgaatggatacataaaatgcagtatatccatctaatggaatattacttagtcatgaacaggaatgaagtactgatacatctactacatggatgaaacttgaaaacactgtgctaagtgaaagaagctaatcacaaaggaccacatattgtatgattccatttgtatgaaatgtttaggtaaatcttatagagacagaaggtagattagtagttgcctaaggttgggtggtaggggattgggattggggagaggggtgagtggaatgggagatgacggctgtgaggggcagagtttcttttcgggcaaagaaaacattctaaaattggttgtggtaatagatgtacagctgtgaatatactaaaagccattgaattatatactttaaatgagtgaattgtatatgtgaattatctgaataaagctgttagtcagtaacactagaaaataaaccaaaagtaaacaaaacccaaaacacaaaaatatatatttcataatctatatgagcatgcagatatttactttcagattttgtgaaggtttttttataagctgctaattaccaggaagtatataaatccctgcagtctatttgttagtacatttatagagtttgttttcccctgtacgttatgaagttttgtttttataggtttgtttgtgaggagaaagacccaaatagaaaactaaatttctatatgttcttattttagggttttattttgagttttacttaaaatttactttcggtttttatcttttgtgagttttgccaattctttcacattggaggagtatatacataaatgatgcaagagttgagtctagtaagtactaaatgtgctcatattgtggatttcaaattgtgacaataacctttttttttttgtaatttacagattaacttttttccatctaatccagtggtaaaacttaccctttgtacaattcagattcagcttgactataatagaaatcattattccaacagtagagttgtagcagcttttcagtggcacctaatctaaaaagagaattagtaaaatggttttaattacatgcttgtctgcttgataggcagtaagaaaaggagagttttgcctttgaaaagtgaaaaggggtctatttggagaagggggttgtcaatacaattccatgcattcctatcaagaattattctgaaaattaattcttaatgcattaaacataagagcctttgttcgaactcttgtgctaaaggtggcaaccttaaaatctaaaaatactctgattagacacccaagttttactttaataatgtaaaatcagtgtttctctttatgaaatatttgcattttgaagtttatatgtaattaattttgaaggtacaattattttatatttagtaagtgtctgctttggctagtttttttcttcttcctgtgtgcaattgaaatattgtttattattgtttagttcagtccattgtaatttcagatgcatgttttgtacttaccaacaacttttcaaatggttattatcagagagcattgtgacacaaatgaacacgcaagtcgtagaatgtggccagctcttgaatatttgatgcacaaatagggagaatgacagaatgcagccagaaacctgtcatccccctagctccacctccactagaaagctccaggatgctttctttgtcagaattggtacatatctgggtggataatcctcaaagcccagggagagtgcaatttaatgttgtggtcttcttagaacccctagcatttaagtttggtgttgccaataagaaataaagggtgctgtatcacctcatacctaagggactactgagatcttcgtatacttctcagatatcattggttatgttctcctgcagaatttaatattggagaattagacaggatgataatgatgataaagatgacaatgagagaggaaaaaagggatgatgtaacatttcttacaaagtcaggactctgggcaaacaagaaaccaattctacggctagttaccatggatttccttgaaggttgacaatgactggattatcagtgtagcattcctggcacttgagttagtgtctgggaatgtagaggagtaatccctcttccatattaggagatggaagcatatattgttgaaaaagcagtccttttgaaaaatctttttattacagttgctatagaagggattcttgttaacatgtagtgaaccaagtgccgtttttgttaattacttctttggtaattaaaattctgttttggatactcgtccatcaccctaccacttgtatcctgatatacgagtgttatgttgtataggttatcagctgtgatgcctgatagagttgggaccctagcttagatcttggcttagatcttgtcacatctcttaacaatgaaatgtcaacaggggataaaaacccttggtgaatgagtttctggctcagttcccaagagttgccctttatcagaaggactgaagagtattacagtgagctacaaactgggatagttactgtgaatctagagttttttagtagccactgagcatggcacttgacttgtaccacagcttcatttgtgacttccttgggcatgagaaatcttatgatggtaagcagctttggggaaggaaagggaaaatttatggtccttggaaaggacaagctgagagaggcaggcttatcatgaagctagggaagttcaaggttcaggaccctcactttcaggccctgagtaatggggtttgctggaaattatgttaagtgtcctaggaggagagtagaagcaaggttgcaatttgaaaacatttctggtaaattttctcaagagatctccgaagaaggggacctgattctctcaaggctccagtaacattggtgatttattttctcattttaagtgactgttcactttatagttcatacttttgttaaatagggctccagttgttttttttttttaattggggcttttttgttcgcatttctttaaaccacctcagaactgggggtaggtggccagttccattcatccccatcattctgttttagtctctatacctattttattttttattttttcttattttgccactcttgtatttcctttctccccactggctggtatgaccccataggctttggctgatgcctcatggaaaaatgaagttcaggaagccagtgaaagaaaagaggatgccaggtgtggtggtacacacctgtagtcctagctgcttgggagggtgaggcaagaggggattgcttgagcccaggagtttcagggtgagagactgcctgggcatctagcctgggtgacagagtgagaccctatctcttaaaaaaataaactgttaataaaatttttaaaaagagatgagaaaaatttcccactccccagggattgcctccatacagataccatgtttagagatgggagtcattttgagacagaagagagaaaaatctctttccatccccacctacccccccctcttttgaggaattcatagttttaagagatttccagatgtttctcatccagacatgtctggagaaataaatgaaggacagcatatattttaacttgttttggttgttaacgccttgcaggcaggcaataaatattctattaccttttcctgtgtctaagtcgatcttaaaggtagaataaattggggctggttattatttgcaatatactgtgctgctggtgatttttgaagattacagaatatagacagtagccaataatattttgaagtggcttgaagaagaaaatatagaaaagcctgttcataactttctgaagcatgaaagaggatacttttgtctacaaatcccaggatatgtagtttaaatggtatgaagttttacatacacagttatgctgtcacatctgtcctaaccaagaaaatttgtctctgcagacaccctgctgtagatcattaccgggttcaaacttcactttatggcttcctgaagctatgggcctcctgctgacatttagttttgcatgttgatgagaaagggagcccctgtgaaaagtttttattaggatgtgttaatgatgctttagtgctctacacaatggctgacagagatgggctgaagttgtgggtgtgtgccactataaataacctgccagaattccctatttttctttgctccagctgagaaagacttccatagccttcacagaacaattcctcaaaggaaccgtctcttctcattccctgaaacagtgtgttattcttctgcctttagttaatctacttcctgcattgttggttgttgactcctctacccactttgttttgtttttaaacaccaattggtgaatatgttccagtagtaatgtgaaatgttcagtaaaatggttaagcttcaagatacaagaaaagcagtataagcatttcttttgtcccataataattttttttcccaaatagtttttaatgcaacaaataggattttacaaagctatatacttttattataaaaaaatcaccataacaaagacttatgaggacatacagtgctacttatatctaatgtttaagtagctacgtttaaattactgctttttaaaaatgctattataacatagttttaacagtttgggagcatattaggcttttatgaaatgtgtgtttctgagacagagtcatgatctgtcacccaggctggagtgcagtggcgtgatctcggctctctgcaacctcctcctcccaggtgcaagcaattctcctgcctcagcctccggagtagctgggactccaagcatgtgccaccactcccagctaatttttgtagttttggtagagaaggggtttcaccatgttggcaggctggtctcaaactcctgacctcaagtcatccgctcgccttggacttctaaagtgctgggattacaggcatgagccaccacgcctagcctggacggtgtatttctcaactggtgatagttcattccatttttcttaatgttgcatcattaaaatttggaaagttttaatatatgcagttgcctgattttatgttagtgtggtgaatatttgcatcatgaactcagttgcacagcatggattacttgactcacagaataagggctgttataaaaatagttttattgttttaaaaacacttggaaataacagttttcatctatagtatgctataaaaataatgaagacaggacaggcaaaactctattattgactccagctgaatatattggattataaattctacttaattagttgaagaagttatatgttttctgttggaaaattgacagattgtttcatttattggacaaattaataaatatttaccagtagtctttcctattgcattatattctctttcttttgaaataattttagccacttttcaatttttaaaaagagataaatggctagaaaaatattaaatacctcaaaaatttattgcaaaaaataaggctgttcattgtatctgtttgtaaaacttaaagactggagcaaaccaaatgattttgaaccaggaattgcttgaatagattatggtatatgtggtacatccatctaaggaagtactatgtggctgtcaaaaggaatgagggctgtgtacaaattgctgtggagagatctctaggtgatacggtttggccgtgtccctgcccaaatctcatcttgaattgtagttcccataacccccatgtgtcatgggagggaccaggtgggaggtaattgaatcatggggcaggtttttcccttgatattctcatgatagtaagtctcatgagatctgatggttttataaaggggagttcccctgcacatgctatcttgcctgccgccatgtaagacattccttcgccttctgccatgattgtgagtcctccccagccatgttgaactgtgagtcaattaaacctcttccctttagacattatccaattttgagtatgtttttattagcagtgtgagaacagactcatgtgctaggataaagtatttgtttgcttttgggttttttgagacggagtcgtgctctgtgtcccagactggagtgcagtggcacaatcttggctcactgcaaccactcccaagtagctgaggttataggcacatgccaccacgctcggctgatttttgtatttctttagtaaagatggggtttcatcgtgttggctaggctggtctcaaactcctgacctcaagttgtctatctgtctcggcctcccaaagtgcttgatttcaggcatgagccaccatgcccagcctaggataaagttttaagtgaaaacagcacagaagagggaagtacacttaataaacaatgcttcctgtttgtggaaaggagggtgttttgtggacttgactgtggaaatgtgtacaaattttgctttaagtttaaaacaaaaccaagataatgaagacaactagtaaaagtacaatatataagtcccaatgtaaatcatgttgctggtatacatggccacactgagaagaaccattttaaatgatgttatgtcacagaaattttaactatatagtacaaccttagtgggatatacattgaagttcaaaaaaaggcaaaagaaagtttaacttgtctcacagtcatttttagtgttagtgctagttttggaagaaacacagaggtgtaagattggtatgattaagtaaaaaaatgaatttgcatgagaagtagcaaaatgatttatttttttaaaatgctgattttgttgatttatcctttggaaatgcccgaaaacaatgagtatccaatagcagtgaataccctgagggtccatactgaggttcaccagaaggagccagggttctttaaagaaatggctggttccatgtccaaggcaggaagtatatgagatgacctggaatatcatgttatcttacaagattactagtcttaccaaatggtctcccaaaactaagccaacttagttactaacaaggttactaattgaagatgaggaacaaaacctatcccattttgtttatggttttgaaaaagataaagagaaagaatcaagtgcttgttttgctttttctagaatgactgtactttagggtaactatattagataggcaggttcttctgtaaagaaatactgcagttaataagtaaagaaggggctaggcgcagtggctcatgcctgtaatctcaggactttgggaggctgagccaggcagatcatttgagttcaggagctcgagaccagcctgaccaacatggtgaaacctcgtctctactaaaaatatgaaaaattagctgggtatggtagcacgcgcctgtagtcccagctacacggaagctgaggcaggagaattgcttgaacctgggaggcagagagtgcagtgaaccgagattgtgccactacactccagattgggcaaaagagtgagactctgtctcaaaaataataataatgatgatgataagtaaaggaggaattatagaaatttgcatctcttattgaaatagtggatctaagtgatgatcatcagtgactaaaaggaagactatctgttatgcgttgttatgtactcctgataggaacttgtttgccaaaaaaaaaaccagggtctgatcaaacttctagatgtgccagcttctaagtaatacagagtgcagaggatcatattacatgaaattagagaatttgaatctgcaaaatctagatcgcaggggaaaatgtaggacaaatgatccagtttcttccacaaaaaagtttgaaaggaaaaagaggatgaagaatacatagattaaagaagagacctatcaaccaatctcattggaatctgattcaaacaaatgtgtatgtgtgtgttcagatatataatatacatacatttacacatatatgaaacatacataaatatgcttgcatatctgcatacctatgtgtatgtgtcaaaagataaaatcacaacaaattttattcaaagatcttaactggcttttattcacaattctagagttgggcagccctcagaaccagaacaggttcggagaactctggggctgcaacttggtcagacagtatttatggatagaaaatggaagttagttatagagtttaattggttataatcttatttgaattagttggctgcctatgattaactaaagctcaggggctgttaactatctgaaacccagctacttgtctcatgagtatactcctaagttaattagtttcctttagcatgaatgactccatattagtttggtctgttggactaagtacaggagcctagtccaaatcaatggtatttccccctttttggtcaggctgtcacttaggtgagagtatgaccacaacttaggtcatcagtgctactctcaattcttatcattttacatttccagtcttaacctgttattcataagttacagtgtcatcatgttcatgcatttccttgggtttttgtcattccaaccaaagagaccatttggtgtttgatggttggttataggcaaacatttaaaacttttgagaaagtacagcatacccagggagattgccattatgactctcaggaggataataccaagagtttggagttagtgccttagcaagggcccccataaatcaaaccaactaaaatcaaaccaactaaaatcaaatagataagctacatgaggagttcacctgttttaaccaaatagcctgtttcttttaattgttttgtaaccaagtgtctacaatacttaagatatttatgcacaacaaaaaatactagcaactgcacagactcctacttagccaataagcaatctagcgttccatgactgggccaaatcaaagcaggaagtgaaaataagtgggtctagaagtccaaatctataaaacagaacactaagaaaatttaaataaacagtcggattagggatgttgctaatattaacactaagtatactaaggaatctctgagatcataacagatccgacatttcatactggttataaagttctaagttccaagtgaaaaaagtaggcataaacaaggaaaaattaagagggataaaagtcacattttgatgaagagttttgttctgatttcttagaaaacaccatccaggctaaaatgtcatctgttcctagggaaacttttccctaatcagctttaccttaaagtcttcaataggtatacagttgcgtgagcctggaggggccattttaaccttgaaccaaggcaaggtcctaagctttactgcaatatacggggagaagaactctatggtccctcccactgggattcaagagcagtctctctctctgtctctctctgtcatgtcttgtccaaaagatccagtctttgggttccagatcaccaaaggtcagattgtcatcaatggattatgaaaggcttgttttagctataaaaatatgccttggtatcaaagtttataagaatgggtgatacatgaggttttactgttattgtattggctttcctgcatgtactgctttgatccaaccagagaacactgttacaagaacatatttacatcccattgaaatggtaactgaatgaaatacatgtgtaaatggtccatcagatagcagaattatatgacttgaagttttgattatcttcccaagatgatgggtttgaaaaaccaaacaggggtcacaaaccaccttagcaattctagaacaatcaccaaaccaatattttttccatgacttgtattattttttctactccatgatgagtgatgaagtatagaacttttaataatggaaactttaagaactcaagaccaggcaactgttcaggttcttcatgagcctacacttaatactggatttatatcctcttaaataccaacttcgattgtccaattcaggtgcattcgactgcttactattaataaataagttatcataggtaatttgaccttgatcaatctaacagtttattcaaatttcttttttttttttttgagacagagtcttgccctgtcacccaggctgcagtgcggcagcatgatcttggctcactgcaactgccgcctcccgggttcaagcaattctcctgcctcgactacccagtagctgggattacaggtgcacaccaccatgcccagctgatttttgtattgctttagtagagacaggatttcaccacattgaccaggctggtctcaaacttctgaccctgagtgatccgcccacctcagcctcctgaagtgttgggattacaggcgtgagccaccttgcctggcctcaaatttcatttcttagcaatttcagtacttttagcatgaaatttcagtaattttagcatgaaagtctgccaaagcatttccttggtatttaaataattcttgttctgcttgatgttcatttagcagttttataaaacaaatcagtttcttcattagatttctgagaattcttacccagtccaatgataggttcttaaaattatcagaaacttgtacttgtcagagttctttccatgaacctccttgaagatgaaatatttatacttgctcaggaatgtaccagagtacataaccatctgtgaatgacaagacttcaaatggtcctggttaaagatctgattagagctccttaaaataatgatgccgttgacaaggaaatttggttatttctgtgtcatacaataattcaacacaataaccaaaattatggctaacatcggatttctaagaattttatacagtttctggaacataccaataacatatccatgcaaatataattcaaggtttagaatcacttttatttgacagtgcttcccatataacttaatatatcaaataaccttaattagttgagtatatctcttttacaagaggagagacacatttttggagggtttcagggactcaataggaaaattccagagttaattctaaggcaaaaagtcttaatttagaatttccttttgggaagtttgttagaatttccttttgggaagtttgatcaaaggtttaaaacacttgatcaaaatgggatcacaggtcactgtgaaataatagtcgtttatttagccagagtgatcattaaagacttcaaagacaaataaagaaagttacataattgtaggaaaagtcttatttttaatagagaggacccagttttcttacataatcaaagacctaagaaagacaaaatgaagcgcaaggattcatcgtgataaaacatagaatctttgtttcctaggccaattacctaaaagataaaagccttttaccatttcctgttaagagcaaataaatacttcaagaaaacctatttgttttgacagaaaggaccaagttctagttttgcatcagtgtagttttgatagtaaagttcaatttttagaaagccttacaaataattccattctaattttagccagcttggtcatacctaaaattcccttcacaaaatccatgttctacaaatcctccacaaccttctaatatccttttcatcattggccttatacttctttctcattttgaaacaaccagtccttttaggacaaaaattactctttttctcttaaaaaaaaaaaaatcttttatacctcatagcttcacttaccaaaaacgtgtttactttccccgaatatggagtcatttgccctactatttccagtttcagttaccatatagtcattagaatatttaactcttagtaatcttaatttctactaaaaacctaggaagtaaagtaaagcagttttgaactttctgtcatatagtaacactttctgtatacacatttcagagtttctaacaacatatggggcttccccatagaaaaatattttttcaactaatagacccaaatataatatatgtagcttctttgcaccatacaaaaacaggatgccgaagtatatatatagcagttagtttcagtgtttaaacatacttaaaattactcagacatttcataaatactaattaacatagatttaaatgtttaaattactttttaaagccaattaaagctctttataaattttagaaaaatatcacgcatatataacatacagacatatatagatatacacagccatacagacagaaacgtatcctagaaatatcattaagatttttcatttgccagtctccaaataactcttcttcaccctttacactatcactctttcaattacctgtttcattgccctaagcagttgttagctaggttgctcactgtagtcaaatttcaagcctaaataccattattttctgagacaaaggcataataagcctagtgatatggattggctgtgtccccacccaaatctcatcttgaattgtagctcccataattcccgcatgttgtgggagggacctggtgggagataattgaattatggaggcagtttccccacactgttctcatggtggttagtaagtctcgtgagatctgatggttttgtaaggggaaaccccttttgcttggctctcattcttgtctgcccccatttaagacatgtcttttgcctttcaccatgattttgaggcctcctcagccaagtggaactgtgagtccagtaaataaaatggtcctaagtgaggcatgttatataaatttaagcgtttggcttctccattgtaaaagtttctagtgacttagctctctctgtcttctcagtatagagagggagacacacttacaaattgagatttctttatagatataaatttttcttacagaagggtcttgaaataaccagctgaaaataatccttatgccataaatgcattttcttcaccaagaaaaaatttaggagtatagcaaagattatgacaagaaagaaatggcaacaaaggtttgagaggagggatttcagtcagctgaaagtttcccattttacaggatcaaacaggaaaaaacaaacagagtgctaatttgatgattattatcctggaagtaaagtctttcggggcttccattagtagggaaacagtccaggtcatagagaatacattcatcaagtggctggtgtaaaagtggacaatatcctttctaatggcctggctgtttacaataaaggcagacatcttgggcacagagttttttagtttggaacatcatggttttggtttaaaatgtgtgcaaggaagttcttttgatttctgtaagtgttgtagctgtcaagacatgcccgtttgcctttggtaaggaggcagtttttgatttgtttaatcttttagcctctgtgttccaaacaaaaatgcatgtcattgttcctgtggggttctgatcttttctttcctaaggagccctacaagtgaacaattttatctaggttagaacttcactgtggccagtctaactatttttggtaaggtttacccattttgcttaaaaataaaaaaggcacagcttctgagtccatggttcttatgcatgaaattggctggagttctagactccttggatccagatgatcccaggattccttgtattctagtaaccttacctacctatggaagccagtccacttttaatctgactcagacacctgactcctccctacaggatccagtcctgtttttgtcaagactttcaaagtttgtgtgctctctcacagcacagactcacccttggtacctgaccccaggttatgcagcctcccatggcacaaactaaccctggattcagaaacctaaaaggttaggggctcgatgcaaaaagagcagagtccaacccaagaggaacttaaaattctcgggagcccgtaagaaagatagaggacttcaaaaaagattcagtggtacctctcctgcattcctcaagggatgtttggattcaccatcaatgtccttccagtgccacactgggcaccaatagtcttaaaagacaaaagaccaatagtcttaaaaaacaaatttagtataaagatgttaattcgtttatatttatgaatcttgaaacgggcagccctcagaaccagaacgaactctggggctgcagcctgttcagacagtatttacagaaagaaaacagaagtgaggtataggacttaattggttatttgaatcagttggctgcttccagtgactagctaaagctcagctgctgtaactaaccaaaactcagcgagttgttacatgagtgtactcctaagttcattactttcatttagcatgaataaccccatcttggtttggtctgttgggccctacaaattttatttaacatgtgacaggtaaattactcactggatgtttgataatcttaatgaattatagttatcttcttaagcataataggttttataatctttaaaagatatctttaaaaatgtctaatacttattaaaaaattaaggttttactaacttgcctggttatctaagaagtcagtgaataatttgcagagtttgacgattttcaaactctacaattacatggtggaatggcttgcttgagctgacataacacaataccacaggctgcatggcttaaacaacagaaatttatttctcatagttctaaaggctggaagtctgagatcaaggtgccagcaggtttagtttctttgaaggcttcttctccccgatagccttctagctgtgtcctcacatggtcctccctctgtgcacatgcatgtctgtgtccaaaattcgtctttttatatggacaccaggcatattggattaggacccccccatacgacctcattttaccttaattacctctttaaatgacttatctccaaatatagtcagattctaaggtactgaggagttaagattttaatgcatgaattttaaggggacacattcagcccattacccacagaatataattttctagtgatttgaagagggagagattaatttttaaactgtataaaacaaggcatcttgtttcaatgaactgtttcgtgatattgagcaggtaggcacacctgagaatgtctggccacttcgtcatggcctacattttcacttccagtccttcggtggtttgtattttgttccaatactgttttccttttaattttccccaatattgatacttgtgatgcacgtacccatgtaacactgaagttaaagtactatttaatgattttcaaatacttctttgccgtctttgaaatttctctctccctttccaaacaaatacacataagaccttatagagaggtgaaccataaaatatagtagcttttcatttcagagttttcttctgtatactcttcaatgacaaaggacactgagaagttaaaatttattttttcatttgctgttactacggcttaaatataaactaaaattcaagtaataattcctttttcttcatctatttaattataagtttgatacagatattgataccatgtcttctttcagttatacttcccttacacaaattacttcccatgtggaataagttgaaaattgaaattatgactcttctaattatttttcatttcttaattttttggaggaaatgtactctagagctgggaaatacaaagaattgtctttgtaaaatatacaagcttgctttaacttcatatatcggatatctcataacagttattcattacgtttgggctataatgacatcgttgttgttttacaaaagtgtctgcatttgtagagatgcatacaaatgggatctggtatttgctgtaaagtacttatgcaactgcaataaaatggatatataaaacatgcgtggcagaattctgatagctatccaacctggatgattggtatgagttttttgtacttttctctctttttgtgtattttgcaatcattcccagtaaaaattagtgctatgacataattatcattattacgtagtgatttcgtagtaaaagatataacagtacactttagcacattcaggagtttgattcatgtagtttccctatagatttagaggcattcttagctgtccttataggatgtaggttggaaaactactcataaacactccagggcaagacagttctatagttggtaagagacatattttgagtaaggttaatttacagaaaaggttctattatctttaataaaaatgtttgacatttaatatcttaattttaaaaagttcagcactcctgatagaaataagaatgattctgacaaggagtctgtcatcttacatggaaatcactttctcttaccttatacactgcatttcccaggacaagcagacatttttagttgcaagtctagtattacagactgtagagataacaccatcctattaattatgcagggattagtttgaaatctatttagtattttcccaaggtcattgttacttctaatcattgtatctattttgtggtattacactatcttcaggttttgaatgatttttgcctagtatcatgttagctatactttagttttcactactataaaatagagaaatcccgactaccctgaggtactaggaaatatatctgataaaagtgtaacagaaatattaacaataatataatacctggaaggatttaatctcttcatcagtatcttctaaaagctacctcaaggaaaatgttcatagttacctattttttacaatatgcatatggattagaattgagaaggaaaaattgtttgagagaattaaatattttcttttcagttggtaacatggattagttaggaatatgcctggttaaggaaatacatatttttaaaaataaaagtctgatttttcctttgtatagtccttatcaagactgaattatcttaatgatcatggattaaaagaaataagctttttaaaaagaatcttcttgagctaaaacttatgactatcttaggaattttctaggctgtacttctcctgtgcaagaagagagctttcaggcatccccagaggcctctccttgtcaagtggaccatctgggggtgggaatgggagagctatttcagtgctagatgagtccctgcagagcaacaaaagtgaaaaaggcattatatctcctctatgcagcctgctggtttcccctttaaacatttttaaatagaaaaaaatcttactctgaaatatggtaagtattaaagaagcaccttcttgaaacctagaactgcagcccattagctgtgggatctgataaactgcctaaactctgtgagtcttaatttcctcatcaggaaaggaggataatatttacattacaggaattttttttaagaatgaaatgaatagaaagtgactgctctagtgcctgagacatagtatttattaaatggcagcagctacttatgtgggtgtagaagagtcagaagggggtaaaactaaaagaaggtccaattgtataatactaaggcttataactatatgctatcagcaatactgcaatgtctgtattttaattttaccctataccatttaattaaaaatgggctctatttgtgatgatgtgttgttgatattgttctcagttagcatttgccacagtgatgctgcataacaaaccacctcggaactcagtggcttaaaacgacaatcactcttcttgctcctgcatttgtgagccaagtggggctcagcttatccaggctgggcttagatccacgctgcagatttggtctagatctgctccacatgccttcatccttaatttggtgggtaggcagaacatgttcttttgcatggtggtagcatactccaagaaggcaggcacatttcaagcatttactgatgttatatccaccaacatcccagtggccaaagcaagacatctcaccacactaaacatcaatgaaatgggaaagtatattctgccaatagtggcagtaagagggtagtgactatttgctatgcagtaatctaaactatttaaatgattatcatcataataattattagttgcatacgggttaaattgcaccaaacatttctaacagcagtgactaggtctgcaggatgtggctgagattgttgttgtggaggttggttgtcttttgacatgtaatgtgcatgtggccttgccatagatactattcagtggtgagttaatccatttgctttgtttccttatgatcaatatgccgttcatgatgtacaaatacatataagaattataaagcacattgttgcttctctggtatcattaataatctagtctagccgaggatgttttccacccgtgttatcaatctgctttattcggtctaaatttccttttagtactaccacagtgtatatttgtcctgttcatttcgtctctgtgtgaaagtttcctctctcgcagaaggtagtgtttcaggagcgtgtttagcattgtaacacatgaattggaaatagccatatcgcaaccatcggcagttattttggcgcacatagtacatgcccatagcacgtttctgtgtagtcatcacagaggaagcttttgaaatgcactcacctttgctggttggatttgccatttgccacttgtaagtgcttatttttttaaactttttcttttacctccacatgaccccaagcaaatcaatcagaagccctctgcttgaaaagttttccaatagatgtcgtgacaccgccagaatctttaaaaaataaaatcactgtgtattcctccaaatgtacaataactgggagtatcagttaggttcacggaatgaaatagagcctaaagaggagtttgtggctgctctaggttcatgctggagtgcagcaaatagacccacaaggtttgtcctcctgcttgcatgcagatggtattatcagttttcttttcttttcttttttcatgcagaagtgggtggagagggctgtttcagctgccattgatgaaaatcaaactcccaatgtctgatggcaggctgctatttcacgctctgctgtttctgtttcaacagaaattttgtttgttgtttttgctggcagtgtttgcctgttctgaagtaaaggcactgctgcatttagttacgggatcagcattctttgtttacattcaaatttgtgtcatggttatggtgcttcagatttattgaaaagaaacaccttcatgaaagctggggaatagcattttgaatagcattgtagtcctgacgaaatgccaaaactttaatgccagtctctccgtgcccactttgtatgctttgggagcatttgacccatatcaaaaacgtatcgaatacagttattctttataacaaccagaatcattatttatcgcccttgtgaggtacatttttgcagagttgtttctgtatacacatttaatatagtaagatctctgcctataatttcaaatgaaaagcagatagttgaagcaaaactgtaatggaaaagtttactgtagctcccctcccttttaatatttagcattaaacactaaatggaggtaaaaacataccacaattcaaacttaccaataaacctagaacttatcttgaaacctagaactgcagcccattagctgtgggatctgataaattgcttaacctctgtgaggcttaatttcctcatcaggaaaggaggataatatttatattacaggaattgttttaagaatcgaatagaaagtgactgctctagtgcctgagacattgtatttattaaatggcagcagatccctgctaataagatctctgcccataatttcaaatgaaaagcagatagataaagcaaaactgtaatgaagaagtttactgtagctcccctcccttttaatatttagcattaaatattaaaacattaaatagaggcaaaaacatatcacaattcaaacttaccaaggtttcattcttttttttttttttttttttttttgagatggagtctccctctgttgttcaggctggagtgcagtggcccgatctcggctcactgcaagctccgccttccgggttcacgccattctcctgcctcagcctcccgagtagctgggactacaggcacccgccaccacgcccggctaatttttttttatgtttagtagagaaggggtttcaccgtgttagccaggatggtctcgatctcctgacctcgtgatccacccacctcggcctcccaaagtgccgggattacaggcgtgagccaccgcgcccggccagtttcattctttatatggaagcaatctctttatgtcagtctcaaatcttacgagatcagaacttgaaagatcaaatgaacactctgctttttcctgttctgatacctactgaagtgaaatctagcacagctttatagggcaggttgcttcctttgttttaaaaggataaaatcgttaagtatggccgtctgttggctgagtgcttgacaggcgaaacataacctctgtccttaagatatcttcagatgtaaaatgaagagtattttgatattttttcttgcttagccttgaatattgagggccaagactatgatagatatctaattttaatcagtatctcatttctttttggcttctagcaagcttctaggtatttaaatctcttggtgcttttttgtaacttagttgcttctctacagctaaaaatctgcttcctatggaagtgacggtaatttgtttgtgaactgcctggagcctggcagattacaaagctgtagaagatctgaagtgtaaaggaatccctctaggaatcacatcaaatacatccatttggttttcagcacattccagtaatgtataattcttgaaattcatagaatctctattttccaactctccactagatttcacaaaggtaatattgcatacctgccttaaggctgctttagaggaagaaatttacttccagttaatcagtcatggcttctgtcacttttatccattactccaattgaacatcagtgaaatctgaaaagcaaaattatgtttttgctcagagcaaagttcattagaaagtcccccacattttttaaaggactatttataaaagttaaaataagtagcacatctaaatgtctataaaatggtcactgattccatttacttatttaattgactaggctaaatcttgacaacttacatagattttattcaggtctgtgacaaaatttcatagaagacttgttacacaggatgcattctataaatttgcagagcatttttctcagcactgagtcttgtaacttaatttgattcagtaatatatgatttttctctaaattatgacttttgtttatattctttcccacccaaagcatcactttatgccaaaaaattcttactttttgggtttctgaccacatctttgcatttattctcaagtttttattatagcataactatcaacatttttaaagaaataattctctgttttaatgagcttgttaaaatattcttccaatatattcttatcctccagattttttctaaaagtttagttacctactaaggaagttatgtgtaaatgtattgaagtgcctacatttcctaataataaaggagaagatcacaaagtactagataacaatagctttttttctggtgctgctctgtaatgcaccgtatttaaattatttagactgtgaagcctttctgtttctcaaattgtcatttaagggtcaaacgccatcttatagaaaggaatgcttgactcagccccctttggaatgatgcatcagctttatcacatacttgactaccttaaataaggcatcctgcacaactctgatggagtgttttcttaatgagcagaaatcataaagatgaacagttactgtattcagtatcattgtcggtccagtgatagtcactgagctgaatgtctacagactccagaaaataacctgaactttactgttaattattcagttctctcagttgtctttttctgctttctacctttattcattcagcaggcagatctcaagagcctgttttgtgccgggctctgagctgagcaccagagcttctaaaggaagcttcggtttgggaaaatatgtaaacaggcatgtgaaattcagctttgagtgctgtgatggaagcatttaaagagtacagttgaagcacacatgtgggggagggctttgtctgctgggacgtcataaaggaaatgacccttaaaagatgagtagccactggcccaggtgcttaagtaagagtgttccactcagataggctagcatgagcaaggcagaagcctgaaacagttggatgtgttccagaaactgtaagcaattgaatacaatggaaatgaagttcatttacaagaccatgatgagagaattgacttttaggctgtggccacattgttgaaggacatgtgtaacactcaaaggagtaggtctttcttttctaatcaatggagagctatttataagtttaaacctgataagctttgggttttacaaagacttattcatcagctgttgggagggtaaatttggtgagtacaacaaggacaaactagctcagttaggaagctattactagaggcctcataagaggtttagagaatctatgtgcctgggagaagtggagaggatataacctttatccttagaggtaaagtctagagggcttgaagaccagttggatgaggaagaactataagattatcatacttaacggctgaggtactggtagatggtgagcggtgtaggagaacccaggctcagaggaatgtgggtgttaatttttctttttgaatttggaatttgaggtctatctacctgaaaatttcatgtagctacttagatctattgctctgaatagcaagaaagttctgggatagagataatgaatttaagtcataatgaaatataatgaatctcatttatagaaaacattctatgtgccaggacctgtttacacacacacacacacacacacacacacacgatgttatatattatctttttaaaatcttcagtataattctaggaacaagatattatcttcattttttttttgacaagtaactaaggcttagagaagttgaaaacatgtgcaagcttccacatctaataattagcaggcccatcattgaaccattgaacccaaacatactgttaaaataatgttcactgtgttttccattattatttttaatagtgttttagaatgggaagcaaggcatgtatgcacttcgcatgtcattgagtagataggcctggatttgaaagcctatagaagtgtcataacagagaatattggaatatttatagtcttaattttatcttattgacagtaggaagcattgaaagtttttagcaagatgaatagaaaaggggaatggatcagtgggagggggtgtgatagtattcttttggatggaagtaacagaacccagtttaagcaaaaggaattgtttactggaagaatataccaggaaaaccttggagaaacaatgtaaggggttaacaggcaaaatgtgaacagtttctagaattccacctccagggtacagccagcaaattagcgcagctgccaactggttcttgtctttatttacctctgttcaaatgtccaagaggctagcagggcgtggtggcccatgcctgtaatcctgacactctgggaggctgaggcgggtggatcacttgagatcaggagttaaagaccagcctggccaacatggtgaaaacctatctctactaaaaatataaaaatcagctgggcgtggtggcaggtgcctgtaatcccagctactcaggaggctgaggcaggagaatcgcttgaacccgggaggcagaggttgcagtgagctgagatcatgccactgcactgtagcctgagtgacagagcaagagaagtactctgtctccaaaaaaaaaaaaaaaaaaaaaaaaaaaaaaaaatccgagattctgagaaagatgagactgagatgagtggcccagcctgaggatggccactcacagctaaagcagtctgctgtgatcattcacttgtaacacaacatctccagctcctttaggtcttttgttcaactcttgaccttagaaaatcattttcttctttctttacttgttaactcagaatgagacttttcaaagaggatgataataagaatagtgctggtggggaatttatttcaagaggaaaaaccataaagtttggagtgaaattagatgtaatggaagaaaactcagtgccatcagccactaggggtctagtttaagtgtccttaaagctcataagtccccatcaactacttcaaatcaaacctgtttatatatatatatatatatatttatatatatatatatatatatatatatatatatttatttatatcagtaatttttagggtacaggtggtttttggttatatggataagttctttagtagtgatttctgagattttggtgtacctgtcacccaagcagtgtacactgtacccagtgtgtaaccttttatccttcacccgcctcccacccttccccgtgagtccccaaagtccattatattaatattattcttatgcctttgtatcctcatagcttagctcccgcttataagtgagaacatatgatatttggttttctattcctgagttacctcacttagaataatggcctccagctccatccaagttgctgcaaaggccattattttgttccgttttatgactgagtagtattccatggtgtatatatatatcacagccaacaaatagttgatttctttttaactatatgctgatgataattcttgctttaatattggcaacaactgactggcagtgccagaaacagaagcaaatctcttcttgactgattgaatacaaataaaatttgcaaatagtttttattatgatccatatcttcgattttcaaatatcaacattatgtttccttagtaggaaggagctttgttattccttccatccctgtatgaggcctagtttccagctagaagcatttactctgatttttattattctttttctttgctggaaaagacgagatcctaaatttatagacttcaaacagaaggaatgctaacattgtacttttaaatccttaatttcctgtagtaacttgttcttatcgatgcaaatcttgctttaatttttcataaacttgtgtgtgtgtatatttttatggtttctcttttgttcactgcagtatccctagggcccctaacagtgcctggaacataataggtacccagtaagtgcttgttgaatgaatgaataattttataaggtatgttaaagtgagacaacttgtctccttgttttcaacatgaaaattagaacagaatttatcaaacttcaagatttgtaaatattttgggagtataataccaagaccatcactgtatatacaccagccataataccattctgtaaagagtggatttaaacatcagacagatcaccttaaatgtcatctgagtcagattgataacgcaattaccaaagaacttttaaactggaatgctactaaagtaataaaacgttatttccctaattccaatgctatcttattgggtattttaaaagtagaaaaacttgtctatgaataagcaaaataaatggttctagttatataataatactaacaattttaagtttcttacatttatattaaaattaagactagaatgtactagtaaaatagaaaaaatacatagtgtaaatgaaaagtgcttattagcagttcggcatttcagatgtaccaattacaactttcatacttgctgtttttatggtgatgattaccctcttaatatatgactgtttctcagtggtgtctacagtgggcatagtaaaaattaaggactgctatttaaggggctgggcattaatttgtttctttaataaataaattatatttaaatgaaatcagggtaaaattcttaggtaattggaattatttattgtaatggtatacttttacatgtttatgttattgtagactgtaaagttgtttataaggtacaagaaaatattgatactgtaggaatgttgaatagtggcagcacttaggtagaacataagtcctctaagaattcaggaataggtataaaaacaatgttgaggcaggcccatactgcctgcactgcttcttaattctgttaagaatgattcgtctgaaagaaggaaggaatcactaggctaattctaccctaatctctttgagtctgctaacagtgttgcgtgcactgctgtggcattttttcctgttgtcatggacacttatccgttaaaaacacagttgcctgctgactgttcatctttgcacattgcctggtgaggcttgagtgtgatttcgggctttgattaaagtagaaagtattcagtagaaatccattctttttattttatataaaatgccgtatgtgattacaatgagaaaataattgaattctgtttgttttgtgcttgttttcagcaaagccaaaaacatttatgtagccctggtccccatgtataccttatttctaagtaaaatgtttttcacttcagaaaaccagttttgtaaacatgccaattaaaagtgattgtttgaagaatgtatcaaatgataaagatttcattattttctaaatttataatctagtgctgctcctaaggaaaatacatttttttcataaagttactaattcatggtttatgtttttctctcaatgtatactcattgtggacccctccccagtaactgaaagccagtgtgattttttgaagaaccataccaggatttggaatcacagagtgatgttcaaacattcttagttccaccactgtgtcatcctgggtctggtactttatctccttatgactcaggaatttttttatttctaaagtaacatctaccttttagagttcttaggataaaatgagattatctgtggagtgtgtctggcataaacatccagtcagtgaatcaaagatctttccatgtgagaataataaactagaatacttggtatttgttgtgctctcactacactgtgagtctccagtaagctgggatgggagtcacccatttggtattctgtgtataatatttttgttgcacttagtagggcaatatttgctatataagggtttgtagaattctacattgaagcttggctggaatgtgttttttcagcatctactttatattgtttgctctgctctctgcatctgttatttttccagcagttgccatttttgctgcctgtggttaattttgctctgaacatttctgttaacaggaggtaaacctaaaggtttttgtgttgactgcagattgttggaacataatttttatcaggatgctgacctaagaaaattaacattgtctgttcatggaattttacctacttggaagtgacttaattactttgctgatgtgatggaactcgctccactggcatacagtttttggagtactgccatgtcaggaattataattggccttctgcttatatgaaggcagttttgcatcatttaacgtgcttcatagctataagttaggagtactattactatcttgatcatacaagaattctggggtggttctctttaataagagtagtattttggctgtaaagtgagtggttaggaccccagcatgccacacacttgtttggattcgctctgaggccctgtgcacaaatgctcaatcaactttcagtaagtgtcattgcctctaactaaacaaatagttattcattcgtcagtagcaccattttaagatacgatcataatacaaactatttgcaaattttatttgtgttcagttagtcaaaatgagatgtgcttctgattttggcattgccggtcagttgttgccaatattaaagcatgcattgtcatcagcatatagttaaaaggaaataactgttggttggttatgtaatactctctttttcttgagccataaatgttgaccaacctttgctttcttgtgtttatactaatcactgtaaaatatcaagatctgttttataaaccacacagaactccaaattgtgtggaattgcctaaccctacaacttttaaaattggaggaaaagtatccttacaaattagtggtaaggagaatttgacaaaaaaaacacacgatacagactgtgaaatcctgacttggcactgatagagcagaaaataggtaattataacaacccataaagtaagtgtgagctagaaacctatcattatttatagttcatttggtccctaataatggcagtttattctgtctgacagttgtgggacctaggggcaagttgcttaatctccctgagccataattaattcatttataaaatggaaatgtgagttgctgcctactcagcctggagttccaaggatcagatatgatcctgtatgcgaaatcagtgaaatatcaataccagtctcccaagtccaagagaagactggaactagcatggaaggaatgcagccagccaatcagagttcctgtgtagcaccctgccctgacctcaaacacaggacgtcctgtgagtcatgtatccttgcccttccctatgccgcgcaatcctgagacgtcagaaatgtggattcatgcaaggagctaagcagtaggttatggacttgctagcttccaatagctgtggaaaggagagaaatgaagggactttgcatgacattagacccagtcaggtggcagggcattaaacaaggaactaagagtatgaaggaagacacataaagttcactatcctgtgtacaatcccagagatgagatgtggatccttcaattatcattaatacattcaaagatttttaagtccacaagaaattgccaaatcttcacaggagttccagaagctgtaaagtattttgcattcagtaggtactcaaatgttgttgtgatgacagtaatttgcaccagcagtcgtgctcttaaaaaatttagttttgtgagttttacgtttgaaaaaggtggtagcaaattagaatgtggtgcagaggaaacacacaaattatcaaagatccatgagtaaagaaactaataaattcaataaggagaaaacacgaaacaaggctgacatcagtacattttgtaaaatacctttttgaagagatgtctgcatacaagatggctatcagatgttttctgtcaataagacaagtaaacaagataatctatgactttctacctgagagatttcacttgattcctgggacttcaactgcacaaaaaatgcatgcattggttcctataattgaactggggaagctcctgcagagtaaggcctttggggtagtttatgagtcctttatagcactcagaacaggcacatttcatacacacacatagacacacacacacacacacacacacacacacacacacacacttgagacaaggtctcactgtcacccaggctggagtgcagtgatgcaatcacagctcactgtagcctccacctcccaggctaaaggaatcctcccacttcagcctcctgagtagctgggaatacaggtgtgcgccaccatgcctggctaatttttgtatttttggtagatacggagttttgccatattgcccaggctggtctcgaactcctgggctcaagtaattgcctgctttggcctcccaaattgctgggactataggtctgagccactgcacccagccctcatatatatttttaatgctaaattaaatcagcagttctgaaaaacagtctttcataaaactgtttcctccttgaggtttaacctgtttctattcttttcccaagtcaacaagattcaaaacattggcatccttttttgactccttacttcccttcaattaccgttttctatgcccacatactattagctacccattcctgtggattctttcttcatcatctttttttatatgtttcttcttttgagattcctgttcccattactctggctagatctctagttcatgttcaaacaataacctcttgagagctttgctagcctttaggttttcatttgtaatttcagcctgtatatttaagttgagtcgtttgtcccaaaacattacttccccctctcaaaaatgtttgacacttgtctaccaagtttttgtaagtttgcccatatccaatttacagattttttttcttgtatgaattccttattttaagcagtggttagctttgctttcccttggaggtgtcattgcctcctttcttctgctctgggttatttctgcaacttactggaactcgcttcttcccagtctcacctctcagaatcctaaggttcagcattgtctcaaagtatttctgtaagttttctcgctgcttcccacaatattcttatgctgtatcaaacaccttagcatatggtgtgaactagaaagttgattgttaaaagggggatgtttaaaaacaagacatctgacaatccattgttaaaagtagctctgccttcatgctggcaacctatctgaatcctcagaaagtttcatggtgtgtaaaaatctgggagaagaagcactctttgggaatcttgtatctacccattagcaaaattatgtataggcatggtttgcacttagagcatctttcattttacataaaatgcatttctttatttatgagattttgtattttaacaagtactcccagataacactttttttgacatttaatcttggattcatacccaatttaggatatgaaaccaactccttacaaatcttaattatgttgtaagcactttgagtgctactgagtatgcaaagcatatatattattgacttttcacccaagttccttctttagagaaagctgggacagctatagatgtttttactgaacagattgctaaatgacaagtgatggattgttactagctgaaaacactagatagaaaatgcatctaagacaaccaaaagggaaagatttttccaaacagaagtgctgttttacccccttaaagtttattcttacgttgtattttgttttgcaaacagacaaaaggaccagtagagctcaggaaggttttgtgttgtgcccaaggttgggggcaagaatttgaaagggatcagtgaatcagatgtaataagggctctgtttgagccacccaatctctgttttgctgacggtcagtattccagttataaaaagctgcatcggcatttccgtcagctcaaaagaactttatccctgctttcattctgacatacctattatgactttgttcactaagcagaaggaattatgggaaatggaaacttgatggcatgtttttattaaggcgttatgtgtgtatcttcactgagaaattaaagaaccaagcagaattgtatgttttcctttcaggtaacaaaaattgccttattcattccataacatggtgatttagttaacttggaaaacaaagtaacataaaatgagaagacttatgtacaaagtacattttatattttaaacaaggaatttaatgcttatgtgaatttctgttaacctaaaatcaaactaaaacataatcacagaaaactgcaaatgtattttatgggggtgggatggtgatgatttaaaaaaatgaatgttacaaaagctgtatttcactcttgtcttctctagagttgtaggcttagagagttgtacatctgtatttcaaaacaagagatacattttcaaatctagctgataatacttaacaacaaactgtatttgcaccttttattatagcagacattcttctgcaaactgcaggcaaattaacatttacaagccaaatattttttgtggtaaagtttatactttctgtgatactctatttaattatgttatataaatgtcaacttcagcttttaaatttcttaacctaatttccctaatccccactaagtagatcttcatcttaattcatataatttactagagaaattcttagatacaggtgtgtcttccttgctggtgaaatacatgcccaattcacttttatattttcaactcgctcacagtgcctgccttgtaatgagacatacatattcaggcatggaatggacaaagacaagagactctcatgcagctatgacaaagaactttatacaatgaaaaacattattaatagctctttaaattttaatgcagaggtttttattttcataagtctctcatttattataagtggaattaacctgtatttagttgtctaataaatgtcatttgtgttacatacgtctccttttttgtatctacgcagagcttagtaaattttcctaaaaataaagttaaacaagatgaatatgagtcatccttaaatgagaggtctctgttaacataaagtaactttgaaagtctgaaaaatgaaggttaacctcattaattttgtaaaaattcgccaaacatcaaggggtttgaaaacaccaagagaaacaataagatattcagcaaagttgcttgttttaaattctaaactgtagtccctgaaaagaattatcaaaaggtagtatgtgcatgtaaaataggctattaaagcaaatgactctgaacctgagagaaggaatgctgctcattagaaaccaaaacttggagtggaatgtctgtgtatggccattatgataagaaaactgaataaagaatgagtttattttattagaaactttcaaaaagaaagtatgtcatgtaaagttaaagaagagccttttctggttttcttgccacatatctcctaaggaactttgtaggtcttcagttaatctttcctgaggagcatttatcctaccaaaatgataaactcgagagaaataatggattgcgtccttagttgtcttgaaagcttaattttcttttccagagttacacctgttttgtattccttattaggtagttccaaaaaactattttaaagaattgtgctctaaagagttttcccattaccatttgacatccattacttttagaggggatgagatatagaatttggaacttgaagtacgggtagtattgtttgaacttcaaggatttatactcattgtaacaccgtagttttgaaatgactgaaatctgtttcatgcaaaaaaaggtgactggtctattctagggagttgtgtttcgtgtttcaaaagcttgagttttgtttttgtttttgtttttttttattgtggttgttgttttctttttgtgatgacatacgaactttagcaaaagaaaaacacctagattataaattaaaattcattaaggcctatgtaattttttaacgtattggaaggaaaaatgacaactgaataattgctatgatttttatctgcagcaattgctgctctttcatctgtagttcctggaatgtgatatttggattttaactttgctttgggatatataactgtttaaaaaccagaaaaaaaatatatttaaaacaattttatccctgtaggttttcgcctttgctttttttcttagaaaaaccattgtatttttcataatgactgctcagcatgaacaaaagcaaacagaacttgagcagagctttcactggtgatattcactcgggtacttgttaagatatcaaatctgagactatagcgtatgcatggttttagtgccgtatgagatattagcagagtagtcatctagtgagagtccctcatattacagctgaagaaatgaagatccaaagctgttgagagattattatcagcgcaaccacgaccataactcggtttactggcttttagttcattgctctttttattttttttcaccaaaccagaaagaattgataaaaaaatgattatcaatgtaatttcttccaatttaaagaaaagtatagtatatcagactaatcgagagtatggctcaattgagtataaaatgatagtggcttattgaagattgcttgtaaaatacataagactaccattggcctttttaatacaagcatttttttagtatcttttagcatttattaataattcatctcattagatagtgaggttacttctgtactgtactccaaattaaagtgcatatttagtgcccctgttggctggactataatttatacaaggcatgactgtaatagaatgaatctgatttttctgtgtgacttgtggaatgaatcctatttctttataatcacatcttgtatattatattgtgtatttttgaatgatgcctgtgtttcaaaagtgccactaatggtcttcctcatattaatatgtcaaaccaatgggatcagaaaatggggaaattctaagcctttgtacaaaacctacaatggaatttaaattttaacacttaatcctgctgtcagatacatctgttacacacacacatacatacacatacacacacacacagagcacctaaattcagtgaaccaattcgtgtgcatcagtaattagatctttagtttgtgcctctgttgacatttctcccttcagactaatggatttcagtctacctagagactgtttttctcaataaaagacattagtccataaaaatccctccctacaaaaataatacatcctaaaaccttgccgaacaaatttgcccttgaaaaaatacttcccaaatactaatcattgacaaaggcattgagggaagaactgctgtgctgatccagacaccaccctttctctacatattgatatctctgtgaatgtaccatcactgcctggcgtccatgcccctgtttattccgaagctgccatcttttgtctataccctactgggattatgtttattctttggtgctcagatcacaagccacctgccatttccattgaatcttcagttatttccctttctcccttgaaatgtaattattaagcactttagttttgcccattatgttacttatttttaagccctttccccctaaatttaaactcttagagatcagggaccttgccatgtctatctctatactcactgtaaatggtagattaggaatcatgtagttcattttcgttgagtgtggggcagttcaacaagaaatggaaatttcccttggtgctaaaatggaatgggtgcttcccaggacgccccaaagagctttgggcatcagtaccacccaccactttcaatgtgaccaggaaacttacactctgtgaccttttgttttgctacttgtaaaggtgggaagccattgtctaaacagcaaataaattttttaaaagtacttaaaggatttgaatcattatagatgatatccaaatgagatattttatcacaaacattctgaactcatgacttagaaacagtagtaatgagagtaatatttgattacttatcctgttcagagtatagcactgtatgctacacttttatatttacatagatgaattcacacatatgtaaaaaacatgttaatgtaatattgttcccagtgctgttggatatgaggaagtgggtgcaatctttacctttgtctttgttttcttatgttatgaatcattcaacacacattctcgttgaagcagggttataattgatggttcagatgctgagcccacaaatttctttgtgcctagtccccagttttgagaggatgtaatacatatatgaatgaaccgtggctcaacaccagactgttgttgttggttttgtatattattactgagaagctagttggaatttgttcattctttgtgcaagaaattccagcgctgtttgagagggagtgtgatacatagtcagagctcagactgtaggtgatctggggcatcttggccatagctacatgttatggttagtagaccaataactacactgcaacatcaaaacacttttatctgccacttctccacttttttagattttattgaagagagtactatactacacccctcccctaggcagtttgtgattcacatcactcatttctagtaaaaccagctgaaaaataaaacaaggtctcatgttccttttattcattatctgatttgactggacaagtcggctctgatcacccattgaacagcagtgtcacttaaagaaaaaggaagaaagttagaaaaactaaggaaaaatagctttagctatgaaatctataaaagacaaaaatgagcctaatctcttatttttaacatggatttcgtctcctgcctggctttccaagttctcgtgattccccttttcctctgttctttcctcttccttctcgtccattgttcagtatttcaaatatacaaacaaggccctgaagcaggacccaatttagcttgttggaggaatcacaagaaaacatatgtaactgtagagacccagtgagctaggagaagaggaaagaaggatgaggttaaagggccaggggctttgttaaggattttgttctgtgtgtagtaggaaccttttgaacatgatccagtttgtttttcaaaggccaccgtagatgttgtgaagagtggaagtaggagatcagttagagtcttctatctatgacttatgctggataatgactgatggtaagatgttagctgtggaggtgatgagaattggtcgtcttgatgatatattttggaagtggagctgttagaacttgcaaatagattacatttaggtaagacaagagttaagctcaactcctagacttgtagcctgagcatttgggtggagggtgaaactacaatggagttggttgtacaggaggagggtgaacccagagttggctttcacatctctgtagtttgagttgcttattagatttccaagtggagatggcaagcaggcagttagatgtaggatactagatctcagtggagtggtcacggtttagacatatatattcaagattcatcttggtacaggtggtttttaaaaccttaagattggttaaaattacctagcatgaaaatatggatcagggaaggtcatgagctaagccttaaggcactgaaggagatggagagggagtcatcaatgggatgggggaaaccagaagagtacccaagggaattaatttcctttgcagtgtgttaggttctggttattgatttttttgttggctttcttaagcactagatttttttatgtgtaataatttgggaatttcaggctcactatgaataagatttttgttttcatctctctttcattctgcctttgctcaagcccagcctcagccccagcccgagccccattctttggagtcaagtggcatcctagctgctgtaccagcttcctgtcaccttcatgttcctttaccctgcaaaggctgaacttccacttgtcctccacttgttccctatccaggcagcaatttatactggttcatttatggtccactatcttgtttttgatcctggccaggttttttcttttgttgttgttgtttgtttgtttttacttttacatctgattattattgctgtgtatttgaacaaggtgatagttctgcagtgtggacctattgtgccatgccatgctctccagaagtcttcatacctcatttctatatgtccttggttttatatccctacatttttttaaaaaagtcctttttttagacaaaaaatttacacttaatactttttcattattcctgtttaggtgcgtgtttttttctgtcattgtcccaattatccacatctgttgtttttcttcacttttatgcttatggaagtcaaatgtctactgtaagttagttttccaaaaaaaataggatttttaacatattatcttgaaacattaataatgccagggcttttaggcaaaggatgtaattcagactagtctgcttattgcatctatttatcaggacattataagaatattattttagcctaactcgatttgttttagctaatacatacagattgagaaatgtaaatggggagcaaataatacgtgcacaggatgcttgcctggacatcatcttagttaatgtaatggaaatcctttaatacatgtttatatatttacacagggagaattaaatgtgaaaattctttacctctgaaaaatttaaaataccttgaccctttacaagtacacctaacagctggactaagagtgtgtagcagcatttgggaggggtctgtgtggaattctcctaggcagaaccctagagcagccgtgcacctaagatgttttccagataaaacacgtgatgtggagctggagcatacctgagatggccatcctgttacagtgtatggcaattaatcctgttcactttggtgtaattaatgagaatggtgaaatagaagtgtaatcatttctgcaagaggaaatgtcagcccattaatgagaataaggattattattgtcagttgaagcagtaactattcagattgctgagttggtgtgttcacataggtaagtgttcatttcagggtataacaaagagagggaacatttttcaagaggattaaaaaaaaaaccaatgatggcattttgacatgactgcagttgtggacactaataaaaatttagtaagcataaaatgtaatttctaaataaaaataactggcattttaagagtcttacccaaagtcagacatttttacatgtatataaaattaagtaacctttaaattgccttttattattgttatgttactacattaaaagtggaatccatttcttattatgtgccatatactacttgtgcttgttttctttgtggctctgtatgttagacctgagtgagttgaactgagtctgagaaatactacctatccctttagattgttggaagaatatcttccctactagagcagctttctagggtttatgcaataattctttgaaaagttggaaagtagtgaactgagataatcataaaaagatgcattgggaagccatgattttttcctggttacatgataatatttcacaaataataaggcatcagtgaacttatattagaatttattgattgtttttagtacttaaattctattggcagcttaaagatttcatgtcattgctttgaatatcttcattgcctttgtgaaagcataggattattgctgaaattttcatggaattctgtatatgttaaatacttaatacacatcaggttgccaatgttcagaaaatgtaagtagcctttagaaataatggggtttggatatttcttttgttaaattcttatagtttacttgaatagtacagcttttcagcttacaaagttctttccagcagctagtgatctttttgttcaatttgcagtaaatattgggaattcacattttaaactatcagttatgtattatgatggtaaattttcaagacctgttttttatatatattatttcttcatgtatgatcctgacctttttctcctaaagaataagcacttcttaaattgtattaagtatttaggatgaaatcttatccttttgtttgttctgtaactttactgtcagcaaatgatttggggtttagtagtttaatagcccagtggactttaattttagttagtgtggtatcacatcataccagtggggctagtgtgcttaatgcacatcatgttctatgaacctctttttttaaattcaagtttcacaaaacagtaacgtacttttgttctttgggctacctgtatcttagtaagttggttactcaggggacacatttgttctcaatggtttctgtagcacattttgaggccacattgtggaaattcattgagaaacaggtttaatttagtttaggtttttttttcttttagagtgttatctttgaaaatgccaattagcaaaatgtctgttatgagtaaaattcatgttgaaactcttctttttctttcaaagttaacaaaaacctgttttaaaaattaggaattagatttctttctttgttgacataagtaaccagaaatatggagctaactaaattacatcaaatttcagagactaataatgatacagttgggaaaagggagcttctacgccacctgtactctgaaagactaatttaattagaggtagtgatatttcagtgtaatttgttaatgggtacattctgcaaaaaaaaaaaacaaaacaaaactgcctaagcactgataattttatatatttttagctggattctgtcaaaagaaagagttttcattgaaatatttcgtagcatagagatgcctggaggaagaatatcaatgaagtgaagaacagcttaaaaacttttgagttattagaatgtatacaagggagaacacaataatcttgctgctttcccagtagtttaatatataaaattgtatgcatagcattactagactactgaaagctaaattttatatttttgataccataattatttttctatatcatccctactgctgttttgattttttttcagttttgtattaaagaagaataacatagcacgttatttctttcttttatttgtggcaacttgtatatgttagttaaatatgacatgacttttcctggaaaggaaatgaaatagcagctcctaatagactttgtaatattttggggaacattataataaaaactttttggtagggaaatatcaatacttgtagtaatttgaaaatttttttttttgaacttaacctacaacaagtttgattctgatttatttcatttttatagaccttttgtcctaattttactgtcttgttgtaggtcactcaagctgaggccttattagacacgatgggctaggatgtgccacactaacagttaccaccagttttctgtgtttaacacaaaaaccgatattcatgctaagtccattgtagatatggatgactctcagggcagttctccatgggggtggttcactcatcctgtgggcttgatcttgtattacctccagctggcccgttctttcataattaccagaaagaatgaccactgcaggggaggagggcatcaacttttaaatgcttctgctgtaaagtgatatgtgtcccttctacctgctgattctgttgaacatgtcgtcatgcttaatgtcaagggagatgagaagtgtaatctttctgaatatctaggaaggggagaaaaactgaagatatttctgagcatcactaatgcttacatttgtcttaatatttagcagcatggcaagtagatccatgtgtctgagctagaatgccatgaatggaatacaggtatgctacagatactcactgcaactgttttttagtttttaatgtggctgctagaattgatgaaataacatacatggctgacattgtttttctgttggacagcatttgccctccaggccatcagcaggtagctccttgggctgaggaagaataatttccaggtatcaagagaatgatctctaggagagtggtggtgatgtcaggctatggttgttctagcaaggacttggcctgcctacccttgatacctctgtcattctggtgtgatccctggaaggctgtctataattatacctactccccacgtctgctaccatgttcaaaagacattaaccaagatttctcagcctgttcaagccaccatcatgttttgatccaaatagcctttacattattgatagactagaaggaaagtttggtaatggagagtaaaaggacaatagtgggaaaagattttggctagaacttcagtggtctcatttgatgggcaaatcagtgccttagttttatcacctggcctcccagggggaagtagaagaatcaaaagaaaatgacattattttgttgaaatgctacatggcacaaacaaagcatggctgaagactagaccagggctacatgaatttggcttcttctctatgatttaaagtttcacagacaaattctggtttctagcttttcataaagcattgactggcccacaatacttattggtgacttcatagccactagaatccatgccccccatgaatgattaagatattaattaggtaatataataatgatcccatcaaattagaattcatgtgcccttgggcttttttatagtgttaaaaatgtgaagactttttacaataaaatatataaaaattaattcacaacagttaaaataatatttgaagggataatattcaaaatcgtatatgcactactaaatatatactacattgttatttgccatagctaccctatgttataatagaaccacgaaactcattcttcctaactcataaatatttaaagtgatggctatggtaattaccctgatttgatcactgtagtacatgtacatgtatcaaaacaccacactgtaccctataagtatgtataattatgtgtcaattaaaattaataaaaataataatatttactcttatggcttgctctgaaaacttactgcaattgcaaacgcttattatttttattattattattattttttttctggagacagtctcgctctgtcacccaggttggagttcagtggtgtgatctcggctcactgcaacctccacctcccagattcaagcaattctcctgcctcagcctcctgagtagctgggactacaggtgtacaccgccacgcctggctaattttttgtattttagtagaaactgggtttcaccatattgcccaggctggtctcgaactcctgagtttaggcaaccctcctgcctcagcctgccaaagtgctaggattaaaggcgtgagccactgcgcccagcctattattttctgttatttttctgaataagacttgtgtagacccattgcaagagaggtctcctgcataacacttccccagatcatctccctgaccaagacctcactcatggagcaaccaccacaaaatttcccaactttcccaccaaaattcttcagttaatctcatcacaattttaataccaatgtgtttatcctcagtgaagattttatgcaagtatttgtttttcactattctaaaatagaagttatataaattttatcatttactgttttagtgtggtatcagaaaattattaattttgtaaattttcttaattgcttattctgtcttccctccctttttctttttactctttctttgctttcatttcttttttctttctgattggatttcaaggttaacaattagtcaaaagtcttattattgatggaaatcaataattaattttgtgtgttttagaattaaagtgtttatattatgtttaagatacacatttttagaaaaaaactcctttcaattaaattagttgatttctctggacactaaattactaaagagaacagtaagttccagaaactgatggttttcaaaatatattttggttatctaggaatgtagaaaatgattatattgtatatatttttaacttttaattactaaattaaattctaatttagattgctgtatgtttaattttgaagctttttattcgctttattttaaagcatttaaaatgcagatagtcttaactatatattttaaatacatatacttactttatattatttatatatatactttatattattaacaaatagattttctagatttgtacatgcctacaatctgttttgtcttaagatttcatttctacatatgtttattttcccaacacaaaggatattttgagaataaatgctgaaaacctctgagcatcactagaatccacccctcaaattattaagataattgggcaatataatgatgattctcttaaattggaattcatgtgccattataattattctcacacatggagtaaacatttcatttgcatgcaaaagtgatgaagtgaagctacttgcatgacacatttttgtggcagtctaccccaaaacagccatcttagacgtaagtagttttgaattctcttacacaaaaagtaagaatccttctttatgagattatatacagcactatatgatcaagttttaaaagccatcttttacaaggtttcacatataatactaagccaaagtgcttccctgttatatggaatttcttattttaccagcctatatgttcactatcagtagtagactggaaacaaatgaagcagaagaaatagaaaaggagccgtgttagcataatgctatcagaacaggcagtgagggcatgtcacacatcgtagtgacaacgttaatcaaatagattattaaatttaaaaagttattgtatattgatgacgttaagacattagtataattgctaatagactttttagaatccttgaagatcattatttattctgagcaaatcaaaacaaacttctgtagattatgtatgcagggaggcaaataaatattcatatttcatgttttaaaatattcatattggccaggtgcagttggtctgtaatcccaacactttgggaggccaaggcaggtggatcacttgatcccaggagtttgagaccaccctggccaacatggtaaaaccctgtcctactaaaaaataacaaaaattagctgggcatggtggtgcacgcctgtactcccagctacttgggaggctgaagcaagagaatcacttgagcctggcaggcaaaggttgcagtgagccaacatcaccccactgcattccagcctgggtgacaaagcaagactctgtctcaaaatgaaataaaataattcatattcatacatgaggctggtgctctggccctagtggcatgaagctataaaggctatagatgatatgaaggtgtaaacatcaagagtttcatctgagatgagttttactcacatagcagctcttgtacataaaagtttgcttataaatcgtgattccatataaggtcatatatgaaaatatgaatctaaataaatcgctagagctttattcaaagataagggattagattatcacatttactgatatttgccaatgtgtacacaagctgtctaaaaagataccttttttcaagagttaattaaaaaaatacattgtgtgtttaaatattactctctttagatttgttgaaggagagttattcacttgaaaaaagatagcttgcttaccagacattttggagcacctgaatgaacttaattgaaaattgcaaaggccatataaaaatattacacacacagagtttatagatataaagcaaaagttaaactttcaaaaaaggataaaaatgattcacttgtgttattggtgttatattgaaaacctaaaaaaagtattaaaactattagagcaatccctgtgaatgtttgaaactcattattttgaagtacttaataggaaaaattttgaaaaacatttgcatttccaaaggactttccacattacatttgtctttgtaagtaaaggaaggaccatgaactttaataaatttagccctcatggctcatgacaagaaagaactttctattatttggagaaaaagtggtaaatactctactgccctttactcccactaactcttgttaataaagttttcgttgatagtaattaagaatttgatatttcaatcaggagacatacaaaggtattttgtgaacacaaggtcaaatttatcattaaagatttaaaaaatatttcagttggaaattttatgcatattagtttatatattccctaatactctgtatttgttttcttatcataattatatgctataaagaaaatggaatgacttttttcaccaagctctgtatagacattctcaacctgtctgtaaaactgtcctgttgtacatgtgtggaaaggattggtaagccctgacatggcaactaaattattctagaaaaaaaaaatcattcctgtatgaaatttagaaaggaactattgtggcaaaatgttacctaagcagattttttttcagatttatgagcaaattcgttatgtggtgaccattctccattggaatatatatgtaaaaacactgtgaaacacttactgttgtggcagtttctccctaccttcctccctcctaatgccttcattaattgaaatctcattcattaataaatactgctctgtggctgtggaaaagaaacttttgttaacactgtgaaactatttctattttctcaatgcctttgaaaatagcaattagtatggaaaaaaataaaaagtcaaagatacttagacatgaaaatatttgagtgttctcatataattgtttctaaatatggtataatgtttacttgagcaaaaattagaaaccatatgtgagtatttccacattttcattcatttggtttatgtagtgctgttaaatgctaatacatttaatatataagatctgtggtttcttgttaatattttataaggatattatggttttatggttaacatcattttgaggtattaccttcagagcaaaaaatttctttaaaataattatttccctggtgattaattttatgttcatcatgttcacacagttttatgtgggctagaacacaataactacatctgatatatgtaaactatgcaatatctctaataataaatttgttgtttaatagtatgattttttttgccataatcatttaatcgtgtatagacttaattaatccagaggatcaagcctgttctttcagttgtctaaggaagcgtattttcttttttcccatgttatgatattctggagtttctacttgagattatctgagcataagaaaatttaatgttgatggaaggaaggttgttctctcaggaaaagatgttcaagccaaattttaaaatcgtttttgaaatgaaattttaactgtttatatgtgtctgttaaaatagcataactttcattaaatatcaactcagtatattcatacttaggataattacataaaggtattgattcgattatattatccaactctgactaataccagcttgaggcaattcaatggaagtcatgtttgtgagagattggggatattgacaacgagacaaccatccattcctttaagttatatctgataattagcatgtttaaccatcatctctaagaaatgttatactttttcaacttaataaactttacttcttggaccagttttatattagcagaaatacagagtttcatatatctctcccagtacttggtttctctgttggtaacatcctgcattagtgtggtatatttgttacaattgacaaataaataacaatgcattattattaactaaagtttctagtttgcaatacggttcattctttgtgttacacagctctatggattttgccaaaaacatggtgttatgtatctaccatcatagcatcatacagaatagtttcactcctaaacgtgtattttaagataaatttgtcatcatctcttcttgaaagcccatatattaaaaataataaaactgcttcatattttgaaaaataaaagttgaaaatcttgttcattatggtactcagagttctgtacctgccattcataaggaaaatgttttaataacagaaataggttggctccagtggactatgtatttctccttacagcagtcaaatgtccatgatattagccttattttcatcatcaaagtttaatttttgaagctaatttaaataaagcacgtcccatgtatatcttctccctttcacatcgtttctatgtactatttttatttttaagccttaaagtctttttgaaaggctatgaactaaaaaatatataacttataaattaagtatatattactggtatacctaagattctgtaacttaacagttttccacttttttcctattaacttttaagtttgtgtaaaataaacaacttgagtaagttttagtgtttgttcctagagcagaggtgaatcttgtcaaattcaagaagatattcctagctgcatctaagtcataggtgaaccagacaacaggcaataaaccttgaccagtggatgataaatggaattcacatgttatccattgaaatttgaaagctttttaatttgtgtgacttgcaaataataaaatatgattcacatggaagaagcatataatcatgagccaggtaccatacatggattgctccaaaaccacaggatcaagtcaggactaatatttcatcaaggagaactttttcagttgacttagttttatctaagatattgacccaactgattaaatatacaaagggaattgtgtaatacaccacattccatagagcctgaataatgccaaaagattttgtgtattttaatatttgagcaaatgagaattagcacctgtttttaaaactctgaaaatcgtaataacagatatattaaaccaattcatattggtcataggttaggggcagaggtgatagaaaaaccaattgactttaaatgactgacctttatacaatttcttctaaagtgttttctctagtgtcagactctcttaggtcaacctcttctcattcataggatgtgcagtaagtgactttttgcaaatgcgttttttgcaaagtcctccttctttcctccctcaagcactgtgacacctgaatccaaataagtaacagtacaacattaatagaataagtgccagtgactatgaaatccccgcttctgtctgtcaaacccttatcctacctttgtttctctttttcttttcttttttcttttctctttctttccttccttcctgccttccctccttccttcctttcttctttcttcatttcttgttttctttcttttcaaaaaattacaataggtttttgggggaacaggtggtgtttggttccatgaataagttttttagtggtgatttctgagatttggatgcacccatcacccgagcagtgtacaatgtacccagtgtgtagtctttcattcctcaccctgctcccaccctttccctgagtctccaaagtccattgcatcatttacacctttgcattctcacagcttagctcccacttatgagcgagaacatagggtttagttttccattcctgaagttacatcactttgaataatggtctccagttccacccaggttgctgcagatgtcattagtttgttcctttttatggctgagtagtatcccgtggtgtgcatataaatatataaataaatatatatatacacacacatatatatgtacatatatatatatatatataaacgtgtgtgcaagtatctttttcatataatgacttcttttcctctgggtagatactcagaagtggatttgctggatcacatagtagatctacttttagttttttaaggaattaccacactccttttcatagtcattatactagtttccattcctaccagcagtgtaaaagtgttcccttttcaccacatccatgccaacatctattattttttttattatggccattcttacagagtgaggtggtattacattgtggttttgacttacctttccctgataattagtgatgttgagcattttttcatacatttctgttccattggtctatatgcctattttaataccagtcatgcttttttggtgactgtggacttatagtatagtttgaggtcaagtaatgtaatacctccagatttgttcattttgcttagtcttgctttggctatgtaggctcttttttggtcccatgtgaattttagtattggtttttccagttctgtgaagaataatggtggcattttgatgggaattgcattgaatttgtagattgcttttagcagtatggtcattggtcattttcacgatatcgattccacccatccatgagcatggtatgtgtttccatttgtttgtgtcatctgtgatttttttcagcagtgttttgtagttttccttacagcagtctgttgcctccttttttttttttttgtagctattgtaaaagggggtgagttcttgatttgattctcagcttggtcactgttggtgtataacagaactactgatttgtgtacattaattttgtatcctgaaacattgctgaatttactagttctaggagcttttgggatgagttagagttttctaggtacaatcatgtcttcagcaaacagcgacagtttgacttcctctttatcaatttggatgggctttatttctttctcttgtctgattgctccggctaggacttccagtactgtgttgaatagaagtggtgaaagtgagcatccttgtcttgttccagtgttcagggggaatgctttcaacttttccccattcaatataatgttagctgtgggtttgtcatagatggcttttattaccttaaggtatgtcccttctatgccaattttgctgagggttttaatcataaagggatgccagatttttaaggtcacaccttaaggaactagagaaacaagaacaaaccaaacacaaacccagcagaagaaaagaaataaccaaggtcagagcacaactatatgcagttgaaaccaaaaaagatacaaaagataaatgaaacaaaaagctggttatttgaaagataagtaaaactagtagaccgttaacgagattaaccaagaaaagaagagagaatatccaaataagctcaattagaaacgaaacgggagatactacaaccaataccacagaagtacaaaagatcattcaagactactatgaacacctttacatgcttaaacaatgaaatatacaggagacggataaattcctggaagtatacaaccctcctagattaaaccaggaagaaatagaaactctgaacagaccaataacaaacagcaagattgaagtagtaatttaaaagttgccaagaaaaaaaattcaaggaccagacagattcacagttgaattttatcaaacattcaaagaattggtaccaaccctattgacactattccacaagatagagaaacagagaattcctcctaaatcattctgtgaagccggtatcaccctaaccaggaagggacataagaacaacaacaaaaaactacaacagagcaatgatgaacatagatgcaaaaatcatcaataaaatactagctataacagaatacaatagcatagcaaaaagataatccaccatgatcaagtgggtttcatatcaggaatgcaggaatggtttaacatctgcaagtcaataaatgtgatacaccatataaacagaattaaaaacaaaaaataacatgatcatctcaatagacacagaaaaagatttctttttaatgcgctatttactgtggtactctcagaggtctaaatttggcattattctcttcgtatgcatttttcagatctttttgttaattttattgttttatattaaagctttagatatgagtgacttatgtaatgagtttagattcttttgcacttttgtatgggagtaaaccgctggaaatcaaacagccatgtgcatagatgacttgaagttttcatcctcatctgcagaacagaaacaatgattcccacctcaggagtcatttttaaggttaacatgtgacataatctgaagtgtctttttcagtgcctggcattccataagtattaattcattttcttctactaccaacaacctaataaaaagtagaattttttgaagtccctgggttttgtttgttcatttgtttgtgttgctagatgttactatagtaggctgtgtgtacttctaaggttcccatctgtttcctactttttgaaaaagttgtaagatattagtggatatttaatgagcacttatactgttcctgtgaccatcaagtgtcctaagaaacaaaagaagcaatacttaactctcatgaagccaaagtgagtttatagtctgcttagggagagaagatccactcatatgaaattattaataaccatcattataactattattattataaacataaagtatcagtgtgtttcagtggacaggaaatacaaataaaaataaaaaatttagagcagttccaaatgagggcataggccgaaatcttgtgaaaggcatcatggtcgactcttcccccaaagtgatgacctggccctagggctttggtatggaaaatgggagtgtcccagataagaatttgagcctgtggggtggagcagcacgaggtaggggatgactgcagcctctctcgccaggcagtatatgttttagaaagtggtgtaagtaaaactgaagagaccaggtgacccaagaattaagagagcattgtactctaggttaaagatctgacatataatgttacagattttaagcagggaggagaaaatcacagcaggtgtctagtctagcagtgggcatgccatgaccaggaactgggaagactacccaggaggcttatgtaacagtccaggtgtttatggatgacaattaataatactagagtgatcacagttaacaaaaaagtgtgcagaagagtatgtaatttttctattccagattatgtttttaaggaccatgaatccctcttgtaatataaaaaagtactttttatacaaaaatatggcaaaagtctcgttttgatttatcagcagggatccaaaaaacaattttacatttcattttttgtctttaatgaaagatgagcagtagatggcattgttctgtagaaaagattcccatttttcacttttaaatcatggggcatggaagatggagtaattaaatatcttttgggatacttctactccaaagacaaacattttgacttaacatcatttagtttgagatatacttttattttcactttgaaatgattgaaatatgaaagataatatagatggcattatgtggaaaataatatattcagtagttaaagtattttatgacttctatcaaggattttatggttactaagggaaataagcatgcctgttatttagatgtggctgtgtgcacgtctcagtgaatttattctaatgacagcagaagaactgtcagcagcttatatgtgcagtgggagggttcataaacactttacttagatccttgagaaatgcacaaggtgtatttgattatattttgtaatatgtcgctattaattacactccaaagagtatcctatgtaattatagccagaacataacatcagacgtttacagaaataaaaaaatcattttttatttgatccctttacttgctattcccatagaatttttcttcagaaagaacaattaaggactttaaaggaataatcttccttagagaatatttttgtttttattattttattacatcttgaatttgtctagttctacacaagttcatggtttaatttttgttttattacctgttgagacaagctgtcatagcatttaagacagcagtagttgttttttttttaagtgtgaagtcattgcatgtatgatagagataagacacatttttgaattcttctactcttgtcatcatttttttaatttaaaatttcttttgggatacacctttatttttatttgtttaaaattttttaaatatgttactgcttaatggaagtactgtaagcactaagaggaatagaaatttgtaaattatttacctgttaattaccataaggtcttacaattctagagcatagtaaacattcaacattaataaatgcattgctttcttcctgtaagcatttgttccgaaattatgtattaagactgtgtgccagaaagtatgcagggtatgcaggataactaagaacatttgccccaaactgcctcttccaagcagtgtcagacatgactaagaaactgaggtagcagagctcagatcactacatgaagactgagaaaaagggggtttgttctgctttgagtgactttagacctgggactgaagagtgagtggaagtttgtaatagggtgggaggaaataccagtgaaaggtgtcagggtgaaaagcaggtgcacctgaggacccagtgtccaggaagtatgaaaagaaggggaaagctttggaagaaggaaatgctagggcacagctcagaactaccatctggcatttcatagtatgaaaatgcttttgatataataaaataaaaataaaacttctgtgtttcatgctactgtatttttatcctttaacctaagcaggatataggtttaagtattaggggtttttttttgcctttttggtataattataataactgacctatttcttatcttttacagtgaagtttagcaactgcaatggaaaaagaaaagtacaatatgagagcagtgagcctgcagattttaaggtggatgaagatggcatggtgtatgccgtgagaagctttccactctcttctgagcatgccaagttcctgatatatgcccaagacaaagagacccaggaaaagtggcaagtggcagtaaaattgagcctgaagccaaccttaactgaggagtcagtgaaggtatagtatccgaatatggctttagggctggttaaaaatcagctttatacagtttgaactaaatatatgctttgcttcagaccacattaatggatggccactatttgcatttgtatcaactttggtcattttaataatattttgttgtgtttgtaatctcttaagatacgtagactaaatatattttaagcaactagaaattgtattttaaagatttgtttatactttgagatttataatttaagttagaagcagtttgttttaaatttcttagaagttttacaagctgttaaataaaaccacaaaataaacaattctttacaagatgtcatcagtcagatttattagatgagaagtacagatttaaagtagtaacaggaaaacatttctggcaatgagtattgggtttttgtcttgtcccttaataatccagttggggggtatgaattatttatactaccaacatgactttttaggaatgatatactccctctggtggaagctgctgtgagccaagataaaataaatgaggtacatttccaacagagtgccattcagttcaattcaacaaatatttattgagcacttaatttgtataagtcattgttcggaattttaaataaaatacagtaacttcagtaacgttatgataatattttctgaatattttagttttttgagttaattcaaaacaaatatgatgggacacacccatatattctgaagtccatgaactatggaactatgactactactttttttatgcttattttactgtgagaggtaaaaacagacacattcatttctggtatttaattgtaaatgtgatatacatacccacaatcaaacatgaataatatatcagaggaaaatatatcatttttctcttatttcagtgttgtggttttattatgtgaaatttaatttgttaatctattaactgttgagggaagtcatgtcattgggtaatataaagtgaaaacccagtaactaatggagtgaaaagatgcttttgttgttgatttgctgtgttccagcaaactagcttggatatttgcactgaagcagcaagggctaatggctaaaatgtctacagatagaggaagaaacagaagaaaatgttgacatccagcagagattaatacctaatgtgcaaagtgggtcatctgcagcatccatcatggctgacataggtttagaataattacagcattaattctgtgggatataatagggtcataaatatttgagacattccttagcagtatgtattaaacttctcttggaattcaaattatattttagcacatcaagatctaaatttaatgtacagtagcacattacctgaactgtggtttaaactaatgagaaatatataaaagggtactattaaattttgctcaatattaactgctatctaaaaaggtttatagaaactgcaaatagtttacacagctgtgccatataataaattgtttagaattcaatttttcagatacacagtataacccaaaaattttatggtatttttctgttattttaatagggggccagggaaaagggcctccagacttattttttgttcataataaactgtgattcctatgctttcaggtattcaataatattgatgtactttcagaaaatgtgtttcctagtactcaggaatgtcttctattttaatgtaaaggagtcagcagaagttgaagaaatagtgttcccaagacaattcagtaagcacagtggccacctacaaaggcagaagagagactgggtcatccctccaatcaacttgccagaaaactccaggggaccttttcctcaagagcttgtcagggtaaggtggcacaattttaactgttttcataccacaagacaaatgtatgttaaaaatatttctgtctattttttttacaaagtagaatttatgacatgtatatactaaaagtgtttttctataaagatagaatttctgtagtgttgtagaaagcctcttctcattttctttgttaccttttggattatttataagtagagctcacttgtaggtcctgcacactgtggattagaaagcttgttcagtttgtgactacacaagccctaaagccaacacatattcccaaccataccatttccactctcataacacacacacccctaaacttccctgtctgaaagctgggctctctgtgatgatctttgccctctacagatggtttttgggccacagaaaaaataaagggcaatcattgttaaaaatgccagcaccaaatgcatttgagagttttttaaagaaaagaatgacctctgataccattaacagaatccccagggcagtgtaaaatcataggctttcaaatctgaggagtaagttttttttttttagttatttactctagatacataccatcagctacagaaaaaaaatgcagatatttttgcattttaataaacttaacccattatttattacaaaagtatagtaagacaaggctgctgtattcccacttattaaaatgtaaatgtttctgtatatgattattttagcattctaacacatacttactgaaagccttttttttaaaataagccgctttaaaatatgttgtatattctgtcctaatgtacattataattcactttaacaaagaatgtaactctaaattaagatactgtctctttttctactttaatgaagtttgagagaaaagggaattttgctttaacttaaaaaaaaaaaaaacaggcagggcacctgtaatcccagcactttggaaggctgaggtgggcagatcacgaggtcaggagatcaagaccatcctgactaacacgatgaaaccccgtctgtactaaaatacagaaaaaaatagctgggcgtggtgctactcgggaggctgaggcaggagaatggcatgaacccgggaggtggagcttgcagtgagccgagatcatgctactgcactccagcctggacgacagagtgagactccttccccccccgcaaaaaaaaaaaacctagattttattgatggattaagtataagtacctaatacataaggatctcttatttttctctgtacctgcctcccttcgtccccttccatagcctgttctgtctcctgtgactgctcatacattgacttaattttcttgagagtagttgtatttggagaaggcagtgagcctataatgatataatgtttgcgagcataaaaatatattttaaaatgctttcttttgtgctttattattaatgaaaatttcaggtgtcacttaaaatgatacggaaagctttggtgcgcaatgaacagtgttagtacaatgcaagtacagaagtctgacattcagggtcaaccataactgtattagagttccatttgagtatatttcacactatggatagacaattaattcttgttgttactgatgcaaaaaggtaaataatgtttattttaatgaaattggacagctcttactatgttaaatcgtctaacctagaaactcccaggacagagtttgattgtttaaaaactctcacttgtagatttggaacttttgcactgctcctagtgagttttcttttagatgttaatgttgcctccagtctttctggtgatagatgacatctcttttgaagcctgtcactgagaagcagaggaagaacaggcactaggagagtttcagtgattttctggggagagatggtataagtttgtagctgaaaaagggcatgaagtgtgatgtgccccatctctgataatgagctcatttagtctctcacttaatgtcattgttttcttgatcctcagatcaggtctgatagagataaaaacctttcactgcggtacagtgtaactgggccaggagctgaccagcctccaactggtatcttcattatcaaccccatctcgggtcagctgtcggtgacaaagcccctggatcgcgagcagatagcccggtttcatgtaagattccaaccagctgataattctgtgtattaacagttctaaatgtctgcagagtttaccattgcctcttatatcagtctgaaagcctcaatactgagagttttaagaattgtatctgtagtcttttggtttattttaataatgttattgtttttatagaattgataaatgccctcatagaaaaacaaatagtgcccacaacaaagaaagaaggaagtgaaattgcctaaaatctcattactctttacatattgatacttgctttcagatatgtggttaagaatctgtaagaacaaatttatatgaatggagtcaaatctgttacatgtaaaatatatagaggtcacagcattgttaatgaatgcatagtattctaatcaaagtgaatcccctattcctttcttattttgaattttctttgggatttcttattgctaagaaccttttgtctaattaggaatgttagtgcttggtttgtcctacattttctccttttgtttatttctaacattgtcaataattttcccatagtataacatcgtttttacactgcaaaattcatttttaaaaattttatcatacattctgtctttccagagatgttgataaaggccttccctactccaggatgccagtctccccagttttactccaggataccaatctccccagttccccaaatttttgttgtatttactttttacatttgaatttttaacctctgcagagttattttaataaaaggagagacccactttgtttttcctttatgactagctacttgtcccaacagcatatattgaattagtttccccattgatccatcatctacacttaatcactaaaactttcatcccacatgtgcatggatgtgtttccagactcttattttgcccactgatacatttgttgaattcttgtacttttaccaacttttaaaattactgaagttttttcttttttttttttatattatactttaagttctagggtacatgtgcacaacgtgcaggtttgtcacatgtatacatgtgccatgttggtgtgctgcacccatcaactcatcatttacattaggtatttctcctaatgctatccttcccccctcatcccaccccacgacaggccccagtgtgtgatgttctccaccctgtgtctaagtgttctcattgttcagttcccacctatgaatgagaacaattattgaagtttttaaacttcaatagattcacctagatctaacagacaaataagcatatgagaaatttaaaatgtcttatgcactgagtattgctctatactttctcttcccaaagaccttgatttcttcatcattccattttttaatatcattggaggaataggttattctaatgctttccatatagttctgaaacataggaaaagaagtaaaacttccaaacgtctcacaaagacaacatagcattaataaggaaacttatttttagatagcacacaatatacctgcctctacttagactaatttctaatttatgaatataaataagatcaatttaaaattcttaaggatctcttcttataggaattctcgctttctgaattcctgtggttaaaactcaggaaatgagtatattcaggtcaattttggggtaaattattgctaagtgcttgctacttgcacattaaaagagcaataccagtcgggtgtggtggctcacgcccggaatcctagcaatttgggaggccaaggctggtggctcacttgaggtcaggagttccagaccagcctggccaacatggtgaaaccctgtctatactaaaaataaaaaataaaattatctgcctgcagtggtgcacgcctgtaatcccagctactcaagaggctgaggtgggagaatcacttgaacctgggaggcagaggttgcagttaagccgagatcgtgccaatgcactcttaccctccagcctgggtgacagagcaagactgcatctcacaaaaaaaacaaaaacaaaaaaacccataacagaacagaattaattgtaaaattgaaagtattaaggttcagtattcagattcaatatataagtataattgttttagtattaagaatctattaatgtaatgtaagatattaaataagccaagggaaaaaaaagaattatctctataggtattgaatggcagtattaaaatttacattgtttttatgtgtttaaataacctctgaatttaaaaaaggatatgttgaagctttttttaatttgatagagtgtatccagcagcaaccaatggcaagcatcagacttaacatgaaaactagaagcattccagtccaaaagaaacaattaaaggagcactaaacagccattggaaagaatgaaatgaatctattctagaggaaaggattttgatattctgccaagtgtagccaaatgaatatttttgtttaaaaagaaaaataagataaagtttctagaagaatacctataaaactgagaactgggctggggagaggaacagctatcgtatatactcgtatatatatatatatatatatatatatattttttttttatggagtctcactctgttgcccaggctggagtgcagtggcatgatctcagctcaccgcagctgccgcctcccaggttcaagcaattctcctgcctcagcctctgagtagctgggattacaggcacccagctaattttttgtatttttagtagagacaggttttcaccatgttggccaggctgatctcgaactcctgacctcaagtgattcacctgcttcagcctcccaaagttctgagattacaggcatgagctactcactgtgcccagccatatactagtatatttttaatgtttgtgaatgacttttacaattaaggaaaagaaaaaaactagtgtcaaaatttcctatgtacacttctttctagattattttctgttgccttgatctctatcactactttgtgctacttccacttcttttttttttttttttttttgagacagagtcccactctgtcacccaggctggagtgcactggcacaatctcggctcactgcaacctcgggttcaagtgattctcttgcctcagcctcccaagtagctgggcttacagacatatgccaccaggcccagctaatttttttttttttgtatttttagtagagacggggtttcgccatgttggccaggctggtctcaaactcctgacctcaggtgatccgccctccttggcctcccaatgtgctgggattacaggcgtgagccaccgtgcctggcctactttcacatttttaattaccttaagtctgtcttctctactggtttagggaagggattttggagctggacacaactggttttggatctaagtcctgtcagcagagacagcagtgaccttcataaatttcctagtctttctgaggctcaatttcatcttcaaatgctgaaaatttctgcctcactcttttgtacgtgaattaaaggagttaaaatccattgtgctctgagaacaatgcctagcatatagtaaatgatggctttttgctactatatctatcctaattatatggacttggtgtaacttaaattttgatgggaagaaccgcttttgtttttcagctgtgagtttattcttgctatttttgtagccttatgatgatgtatttatcttctcacagacataaatctgttaaatagttgttttctaattacttttgcagttgagggcacatgcagtagatattaatggaaatcaagtggagaaccccattgacattgtcatcaatgttattgacatgaatgacaacagacctgagttcttacaccaggtttggaatgggacagttcctgagggatcaaagcctggtaagtttaaagataataatttgaagatgacttgaggaaagtatggtgtaaccagccctgttatatgagcaagaaatggagaaatcatatgaggctttttggatccttttctttcattcataatgcttttgggaaagaaggaaggtaacttagggaaaaaccaattgaagagagaaaaacaaaaaaaaaatccttcttattactcatactgatttttcccacctttgaaaaaatatgcactacagtatttgattctgtcctgtggaatacataggatcctttcgttctgctttagttgatacagccaatgcatcttgaaagtgagccccagaagacgagaggctttctgtttatcaagtacagatgtgactgtatgagacgtagcagcaatttaacacagtgagaaagccttaaagatacttgacgttcctgggactaggtggcgaagtcatagcgaaagcatggaaggggcttagtaacatctgtgattgctgccctctagctccacaggacagttattttcagggtggccagcgtgtcccctgcagttctatcccttcaaccagcaaaatggaaaatgccctggcctagaaatagcacttgtggaaagccactcatgattgtaaagtggtatttgactaagattttagattctcgtattaaaaatatgacacacttcagtcacagtagaaaagccaggccgctagaaaaccagtggacaagacaatcagttggtatagggatggtaaaagtaagtgtttgaccaggcttcctgagatggcgtggtgttcagagagatttaattagctattgtatttttgttttgtatttttaaaagcctcagcatttaaaattgtgctgcataatacctttgtcattgacaccagtttatgcaactcccttatgcataagtcagtttatagatataaccaactatgcctcaaacacatacattttcttggtccaagtgcatatctctgcctcttcagaaaagatgtaggggtagggtgggggcagctggagggagaccaggggctgtgcaggaagttcagccatctgtgactccttctaagtcacatcgtcagagtagctttcttcagtattttaaaatacagtaaaattaaagcaaattcagcatttccttactaaaacacaagtcttagacaaatcttccaaagaaaacaaacattgggcttttgggactgtggaaatttttttatattattttcttttttttctctattatttccaactttacaagaatagtttcacaaaaattgtttaaaatgtgccactaaagctatatttatgatgcattttaccatgaatttccatatgagccacccataaataaaagactgtcagctattgctagaagtagacatattgtgagtatatttcttgtggttcttctataagtttgaaaacatccttctaggcaagatttgtgatgaattttgagctaaactgcgttgtgatctatattttggctcacacttctgaaagatacctttttattctgatgatttattcattcattcagcaaatgtttataaagcatatgctgtgtggtaagccttgttctgacactgtggatacagtggtgacaagctagttcctgccctgttggagcttaaattgtagtaggggagagaaataaaaaacatgcaaacaaggaagtacacactgaaggttttgaaaaaataagggtgtagggatgacacataatcaaaataggtaaatcgtttaaagggacaagttctgaaatgagatttgaataatattaccaaagcacagttagttcagaacccaaggtataccatggagagagaatacccaatgtaaacaggctgtaaggtagaactgaacttgagtattcaaaaggaaggtagactggagataaacatttcataattcagtccttaaatggatcccacagaacaaaccactctaaacagtaactacttctcactctacttctaaattacagagtgtctagctagtttgaactaattcgatacaaaggctttgaagatttcttttccaaaatatctaataaattgaagtctctaagttggttccaatgttcttttaatcactgaggaaataatgaaccacgatgccaaatctctatgcaatgtaccaaaacagcagtgcatgaaatggttccttatgacctgaggaaatggagtgtgctgctttctgcacacagcctacattcggaaagtgactcaggcactggggagaatcatactcagcatgttattttagacatcattgcataacggaagaaaagatgacagagggaagaatcagcggcaataaattacttttctaatggtatctgtattacccattatttgcattttatataaattaaggtctaaaatgaacctttttggaatcataaagtgaatttatcttctaagttatggaaaaattgagtttttataaatatgtatgttgtataatttttcattcaaagatccagaccaggttttatcttttttgaaataagtactgttcttatgagtagcatttttaatcaagtctaaatgactttaaatatttgtttttaaaaagtgaaaataagacatatcaaaacaataaatataccttctattttggggtccctggaatgaagggtaaccattcattttccatgtacactgtctctaggaacatatgtgatgaccgtaacagcaattgatgctgacgatcccaatgccctcaatgggatgttgaggtacagaatcgtgtctcaggctccaagcaccccttcacccaacatgtttacaatcaacaatgagactggtgacatcatcacagtggcagctggacttgatcgagaagtaagccaaccaaaaactctatttgtgtttgtttttaatcttaaaggtgcacaatatcatatcacatacattttatctccacatcacaatatactcacagtgttattcaaatgctaatcgttttcattaagtaatctgttgtatatttttctgcagagcttcaaattggttaaatgatgtatatatactggataaatcaatgctagcctatgtagtttttaatgtgacactgactaagcaatattctctggtatctaatttttaaaatttttaacatttcctcattttcctttatagtcaaaggtttttgtgaggaattaaaaatcacagccaaataatttgcacacaaacttaggataattgttaatgcttgtgttattaaaaggctgcaaataacatgtatgtgatttggttttttgtagcccttgtgaatagtctgacatagtatatagtagattatcttctttattagaactagccccttaactctatgattaatttacttaaaagatttaagcagtagtaactgcattaattctacccacaagtatttaaagttagaaatacaaagaaacacatttctgaaataacatttagttgaaaatgtatgcaatgttgaaggcattgaaatactatgcagtatcacagtctgagatggaatgggtacttcttttaattcccagtgggccatctcagtgttacaggcctcgacccactgtgctcctacatacccctgtgtttttgtacatgtgatccccttggccaggcatgccttgcacctttatcttgatcttggatcttctagttcttccggttctgattcaagcactgctcatattctttcctgaaaaccccactcctggtgaaactttttcatcctttctcgattctgtcctgactattttcttacagactctcaaggtcattattttgaccacatgtaatcattgtttgagtgaaatatcaaagcgccaactcatagggagatctgtgctttgtagatttctggctgagccagcttttactgtaatgagacttagattatgtatgtcaaaaggagacattatacccactgcaataaaatatcattgacaaggattttagaagttcgtgttttttgacactttatttgctatagaagcattcatttgaattgaatagaagaaaacattactattgcaattgttcacacaaaatagtgctagaggcactacaataaagtaatatgagccaataaagattagtttattctgagctgagagccttacttaggagttagtgtatgcctatgacattgtacctattgacttgtaggcatcaacagttctttttctagaaatgatttgcatcagagattgttggactcagtttagtttcttaagtagtacttttagttcagtaacatgtgtatattttcacctcttcattgctatatgaaatactatttttatatgccgataaactcagcatgaatgccataatttattagagaatatggggtaattttcagtattctttcttcagtgccaggttgctcatataccaagtagatttagttcatttcataatcctaatatttctctttcattcacattgtcattgtgagatacagaaatgagacttcatcctgttttcatatggtaatattcctatctcatttagactggatgttttatggaaagaaagaggcatggaaaattaaagatactttttactaaaacagaccaaccatgtttaaaaatcagactgtatttcgtttagaggatgaaagcctgacgtgaggccataattgtcattaagtttatcttccagtggatagagaagctgttcactaccccttgattaaactaatgtggaaatggatttgaaactatagaattatgggttagatacagtatgagaaatagcttcttgacagtgaaattattaaacacaacaatgagttactagggaaaattatggaaaaccttccttttctgaaagtcatttaacatagaaaaaatgcatctatctcggatggtttatgataattcttcctgaggccagggataaattactttgactttttcaggcctcgtgcagacttgaaattcttttatttctattagaattcacagtttcctttctgtcaaaagtaatgtgtgttctcgtgctctcaggatgtatgacacctttaagtgattgaactcctaatcattgaaatgcttagtgagattcagctttttatttttgtttaatcttcaggttttaaaaatttagttttaattcttcagcttctccagacctaaaggtgtatttgccacattacccagtcttcagcatttgttcccatctgtcctcttgtgacattacttgctggtagtattcctggcctttccatttcatgtccattttctgccctttttgtgcaggactgtcaaagactcacccctgctccccccaggtttgaactctggctctgcttagtatgggctgtttgactttcagtgtattaacctgaaacctcagctcctgcatccataaatggggataatagtattacctacctcatgggacagttttaagaattatgtaacatgacacataaagcattcaggccaggcacggtggctcatacctgtaatcacagcattttgggaggttgaggtgggtggatggcttgagcccagaagttcaagacctgcctggacaacatggcgaaaccccatctctacaaaaaatacaaaaattagctggcatggtggtgtgcacctgtagtcccagccacttgggaggctgagcgggagaatcacctgagcctgggaggtcaaggctgcagtgagccgtgattgcaccactgcactgcagcctgagtggcagagtgagaccctctgtattagtctgttctcacactgctataaagaaatacctgagactggataatttataaagaaaagaggtttaattggctcacagttccgcatggctggggaggcctcaggaagcctacaatcatggcagaaggcacctcttcacagggcggaaggagagaaatgaagagtgcaagcaggggaaatgccagacgcttataaaaccatcagatcttgtgagactcatgcattatcatgagaacagtatgggggaaactgcccccatgattcagttacctccacccggttccgcccttgacacatgggtattatgaggattacaattcaaggtgagatttgggtggggacacagagccaaaccatatcaccctgtctcaaaaaaaatgtatatatatatacacaaacacacacacatatatacatatatatacacacacacacatatatatatgtatatatgtatatatatataaatttaaaagcgttttaaaaggcattcagcacagtgcctaataaatctgagctattgttttccccactgccatcatgaatagcaacagcagcatctcctggttgagcactatctatcacctttactcctcttcataagatgaaagaaatacttcctgttttccaaacctaataatctttctgtttgtgccttcaactcctagttccatcctgaaggggtgttctcctgttttctgttgtcttcaatcttccttcctctacaggttgcttcataatctacaaacctgctgggtctccactgtggtagcatagctctccatgccctataggatgaagttagagctttttaatagtgcattccagaccctctgtgaccttggccccaaaaccctccttaacctaaccccccagaattacttgcctttcacatacaaatgatgcccaaccactcattgaaccacacacagtccttgtgcaaataggaagttttctattcttctgttcccgtttcctctgcctaaatattgttctcctacataacaggctaatccttaccctctgagagccagttctcaatcccttctctgatcacccacagtagtctctgcatacctctatatagactgtgttacacagaaagtatatctggattcccattctcaacatccagtggggcagatattccttgtctcattaccctgaacatgaattgtaaagaaatgtttaagttactatactttacctgagttccacaccagtcttctccaaggggcacccagcactcaaggcaggcagatcagttgagcctaggagtttgagaccagcctgggccacatggcgaaaccctgtctctactaaaaatacaaaaaattagccaggcgtggtggtgcatgcctgtaatcccagctattcaggaggctaaggtaagaggatcacctgtcacctgagtctgggtggtcaaggctgcagtgagccataatcgtgccactgcagtccagcctgtgtgacagaatgagaccctgtctcaagaacaaacaagcaaaaaatacttccactccttccttgtccacttgaagtccggctttccacctgcttcccccgcttgacctgtgcacatgctgcatgtgtgcagtactcttaccatcttagagggcactcacgtagtggattggttaacggtacagattcttgaccatacctgagttcaagtctattatctgcctcttatggctgggtgtccatggcaagctcctttaccttcctaagcccatttcctcatctgtaaaatggggtttcaaaaccccacctgcctcataggattattgtgaggactaactgaaataatgcatagtgcatagcactgtgctgggcacatagtgctcaaactcaataaaagttgttttttgtttttaaatcaaggcccttggaacagtgccagcatgtaatatgtatacaaaagaaagaccacatttataaggtagatggtacttttagtcccatttcacagatgagggaagtggggcttagcagttaagaatttgaacagagttggccaggagtggtggctcacacctgtaatcccagcactttgggaggccaaggtgggcggatcacgaggtcaggagatggagaccatcctggctaacacggtgaaaccccatccctactaaaaatacaaaaaattagccaggcgtggttgcgggcgcctgtagtcccagctactcgggaggctgaggcaggagaatggcgtgaacccgggaggcagagcttgcagtgagccgagattgtgccactgcactccagcctgggcgacagagtgagactcagtctcaaaaaaaaaaagaatttgaacagagtcacaaatctatacttccctcctaagtttcggtgacattgttattcaactctctgtccccaacccaatttatctagaggcaaatctgtcatctcctgaaacccgtgatttatgatgaatttcctatttcacgtgaccaggaccttctcctcagtctcccaaggtcatcgtttaattgcctttcccatgccctgctgtccctctacctgcaatctgtttagtcatcaagttcttctctttttactcaaagtaatgacattaaaagtaatggcaaaaactgcagttacttttgcaccaacctgatagttggtatgcactattgaaggttcttcatattacttcttcctaccatttctagacttgcactcatgcatttggtggctctatatggtcctgtgatcctttactctctgcctccatcacttagtgaaagcaaggctgtatctcgttttggtcactgttttacccaagtaaatactccattgcctggcattttgaagacatttcattaaatgtctgctgtatgaatgactgaatgttctcacctcctcattcactgatgtcactcagtgtttcaaaattgtgctgcacgtgcataagattttaattggtaaatgctgagaagcctctaggacagcaagcggacacagcctttcacgtgctacttcatcaagtagagactgccagaatccaagaatttcatcatgtttattttttactgtcatatttatgataactgatgctagctttccatttatgggacttttacaataaattaagctttaaaaagggaaattaatgtcaatataaataggaagtgactcatagtatgaggaaatgttagaattgggactactgtgcatgaatcactgtggttttgggaaaaggtgagctagtttatgctcccagtatgggttttaagaagtaaattatagctatccatgtgaatagaagatggctttttctttacctgagataagatcatgcaaaacccaaggtttcttatgcattcacccatccatccaccaagtcagaagcatttgtggaattcttactctgagtcaggcactgtgccatatatgccagtggcacaagcatcaacaaagcaagggcccttgggacacgtgtgtgtgtgtctgtgtctctgtatgcacacacatgcacagtgaggcagatacagacatacgactgataacagccatataaactataaacagtgatggggtgtgttgtaagggctctgtcctgaggacacaaacagctcttcctcaagaactttcagaagtcgtctccaaagtgacttgtaagctgcatgttagccaggcttggaatgaagggaatggtattctaggcaagggtttctcagccaggacactatgacatttttacttggttatgaggcctgtcttgtgcatcataggctgtttagcagcatccttggcctctacccattagatgtcggtactgagtttggttgtcacaactaaggagtgcttagttgtaacaacccaaaatgttcactctgtgtaacatccacttgtctaggcagaggagaatgccaaatggaatgacacaggatcatgacagggcatttgaagataaatgcaaaacagctccaggtgtggggtaagcgaatgggaggaatcacttttgtaaaataggcgagtttcggagagggaaggattgacagcaagcagatgattttggattttattccatatagagcaggaagggaggagaagttttcaagcagaatccccttgatcagctgaggtactatgagagtgggaagtcgaacacttaacggaatctaaatgtcagtcattcacagccagatgcccaatgaccaaattaggcaagaagctctaagcagttcagttgtctaaaacacaggctatcaagccttccttactaaatataagaatgttttagcaatctggcatttgaaaatggagatgacattatttactatttaccaagtggaattttttttttatttgaagagatattgtactttggaaataacaagtgtccttttgtaatttaaaatttccagactagcttgcagcaataagaaatttcaagtattagctactaattccaatattgcagatcaatggaaaattattggatgtattatgcttacataattctaaagatttttgtagactagacattaggaaataactatactttcatgtaatacctatgtgagttaacttcttaagaaataagcttcctttttttctctctttttgagaatgttcatctgtttctgcaaatagcagctaacaaaactgacatttcaaaagtcataaaagtttttattttcatggttttcagctgggaggctgaactgaatgtcctgcgaaattctctcactaaccatgaaagcattaagctgaagtgacacttctaattggggaaggaaagcaactgaagaagtattatagcctatgttaacattttttttttttttttttttttgagatggagtctcattctgtcgcccaggctggagcacagtggcacgatctcggctcactgcaacctccgcctcctgggttcacgtgattttcctgcctcagcctcccgagtagctgggatttcaggcgcccaccaccacgcctggctaattttttgtgtatttttaatagagacggggtttcactatgttggccagactagtcttgaactcctgacctcatgatccgcctgcctcgacctcccaaagtgctgagattacaggcgtgagccaccgcacctagcccttagcctatgttaacattatagtgaggtactgtgggttaagaaaaaattaaatgactcaaccaacattatttcttactgcgtgtgtgttttttaattcaaaatagtgtaacattttctctttttggaagacaaaaaataactgaaataaataactgctagagattggcatttgggtggacagacagagacttagaatctagtgtgggcggtttggctttccttcctactcctttcttttctttgcccctccccctgacaactaaatcaaaagctacaatttgtgtgtgttctatctaagctccagaaatcccttaagaatggccattcataatgttagctatatttagaaacagggaaaactgcactttgcagtgacagtttatttttgtatgtagcggattttgttgttcagaatgttttaacatttatgaaaatgatcactgtttttgatctatctgcaaatttccacagagattccaaatgattttagatattgtttaaagttaggttttcctaatataaaacttactcagcaaatgcctgacttctcaatctcagcattttctcttagatatattatagcttaatttggctcttttaaaacagtcaacctggaatttgaaagtagtggatgcctgtctaataataatcatctacatgtaaatgtatcaatatttatatccattgtaggtctgtgcttaaagcagtggacacaatgagtgttatacccaaatcctaatccattgaatatgcagttatcaaatatatgccctgttagaagactatggaaataaacggaaacccttcaagttttgactttgtttaagaatactgtatatctcttctatatggttttgaatcatatgtatcaatagaatttaaggggaaatattgcatctaccctgtaataatagaatatatgtaagaacatataaaaggaaagcttatatactttgtgaattatgtatgtgttcttctccctgtcttgagattcttcattgtttttagtatcctaaactgggtagaaattaacatagaagaaagtaaatacgaaccaaatgacttgaatgcttgatcacaatctcgtgaagtgaagaaaggcaaaagttggaaccagatggaggtttcagcttagctgtgaatttcacacatctgcagtgcattcctttctgccagtagaggtgaatatacacagttaaatctctctagacaaggaccagacctgtgcttcataagttaaaggaaactccacttgcgaaatttcaagtcatgttaatcagaatgaatgatgccatgctctccttgcattataaagagccgtttacagaacaactgttatgtcttcttgaggaattagtttcatttaagttcttatctttatgtctttttagaaagtgcaacagtatacgttaataattcaagctacagacatggaaggcaatcccacatatggcctttcaaacacagccacggccgtcatcacagtgacagatgtcaatgacaatcctccagagtttactgccatgacggtgagtacagcctgtcactcacacaactttgggtctgtagttcgttactgagaaggttggtcatgaataataaatgtgttaaatagaggtggaacttgcttcacctaatagtagcatggctgctaactcggacatttctgtcatcagggccttacgtgaggcatccaagtaatttgtttcttcgtagtcttcaagtccactgttaaagttgttaaaataagctgcctggaaaacacgtcctaaaaagactgtgctgttacaacaaaatgcttatgaatattttcaggtgcatgagctgcatgactgatttatgctactttgtcagcatataattatccatatctggagtaaaatcattttgcacagacaagttctttcccccaccccaccataatcacccagagactcacaaatggatgctgattttaatattaatgaaactgtaaggtaatttggaaaaaaattggactactgaaaaatgttacagtatttttaaagtcagacataaatgctgtgattacctgcattatcagtctcctcatttagtgtagataataaaaatctaatggggcagtaaaatcggacggtgtggtcatcaagacaagttgtccttcagtggtccatgcccctcctctgactgaggtttgtctttctcgcagttttatggtgaagttcctgagaacagggtagacatcatagtagctaatctaactgtgaccgataaggatcaaccccatacaccagcctggaacgcagtgtacagaatcagtggcggagatcctactggacggttcgccatccagaccgacccaaacagcaacgacgggttagtcaccgtggtcaaagtaagtgttcctcgggccactgatctctccaacagctgctcagcaaggaccaatatatgtcccccactcattgttttgcaatggaaacttaggacgtttttctttcagacatctccagatgtgggtctgatatatatttgggaggttatatcttactgtttaatttatgctgaggctaaggccaacatcagtactctcacatcatcactgatgtgagggtttttgaatgagttttatgatgagagttttgtgagagtttttgaatgagagttttgagtgagagttttgatgattgtttttgaatcagtttggacagtttttaccaatctgaggataggactggcctgaacaacattaactgttagtgtagttgatatattcatgatatatcacattctgaaattttgatcaccattgatagctattaagaatgatgcctcacagctgctattttcatgtctacagctattagaatattggcagatagtgaacaaaccagaaaagccatagaagaaaaatgtaatgagtaggcaagaagaaagcctgcattttagaaagctcttgcatttgcatggctgtttttaaatgctatttccgagacgttaagaaatgtattcttctgatcttatggtcaaaaaggaaccaaacaaaacagttgcatgctagaagccaaggggatgttcttcaagaataataaatgcgtagctataatggaaaagcctgttaaagtgaacatcccttccttttagccacccagtaaagagatttacttctttgcctcccacttaagcactcttgatttgtaagtgaacctaaatattgaccttacatagaaagatgtgctaaagtgccagttgccaataattatgcagatgcgggagtagaatagaatgggaatggaaactctcagaaggaacatagtgatcaaaagcaccaacttgagtctgctgtctgtgttagagtcccagctctgctcctgatatctgtgtgatcatggccaactatttaaccactgtaaattctaggtttcttatgcagaaaggggctgataacagtatgttagtcatagtgttctgagagataaatgagcttcatacacattaaaggactttgaactgtgcatataccccttagcataaatgttacatcaggggaaggtttcgtgtggctagtgaaatcactctaaatattgcagtcttaactttctggctttttttctgtcttgcttaaaatactagagaaaggaatgttgaattggggatttagagagaaaaaaagatgtgtttgaagatttttaaaaggtggtctagggtacgaaactggtgcagtttctgctgataatgaagctttcttatgagcgtcacctctcgatcattcttaggctaccaattatgagcctaagagatcttaatgctcttgtttttcctgttattactgcacagtaatgcttatttgcacatccattcgcaggtgaacaaggaaaattaagagtgaatgtccagtctagtcatttgactcctggtaatatttctagtgacagcaagattcagtgaactttggaagttagtatttacatgaagggttatttgtgcattgcatttatctagagtgtttttcttaaatttgggggttttacagaccaataaaatatccagaaatattccagaagacagcagagttttagtttgctaagaggaaaagaaaaatatcttccacctaccaacagtattatttttaaaaggtgtgtgtgcgattatgtatacatgtttgtactgcaaaatgtgtacttcaaattatgaaaggtacttttaaatcaaataagtttagctgtatttaaaaattacattttctgatttttggtttgttttcttcaattcatcatagactggtgaaagctttcctgggtgaggagtgatctttgtactaatgtttgagagtatacatttagaccatcatgttctcacttgactttatattatttagtatttttagtcaacaatgctattcttaagaataatcaagtttttagatgtacctaaataaataaatctgtgcagtaatcatgtgcactgttttgtgaacataaatcttttaagtactcaagatttataattaggttaaattgggataaatattttgataagtgaccatgctaatgcatgttttccagaaacttgagaggaaccttgttatgtagtgaatgaagaaattaattttttggaaatggagttgatagaggaataaactacagaatgcaagcattcttatttcctgcaaaaatatggcttcccttttattttccagccaatcgactttgaaacaaataggatgtttgtccttactgttgctgcagaaaatcaagtgccattagccaagggaattcagcacccccctcagtcaactgcaaccgtgtctgttacagttattgacgtaaatgaaaacccttattttgcccccaatcctaagatcattcgccaagaagaagggcttcatgccggtaccatgttgacaacattcactgctcaggacccagatcgatatatgcagcaaaatattaggtatgaaatgctgtttgtagtgtttttgtagcttacttatgttctatgctgtgcataaaatttatctaattcactatttgagtagaaattttcattgcaatcaaaactacttattaaaagataatttaaaattctttgaattttcttctcagtaagtcaatgactatattagatataaatagatatctgtatccatattaaaatggatttactatttgaagaaaaagctgttcttgtttctctgtatctgccatttttacttaaaaaatactttaaaattatttagcctgtgcctttatgccaaacatcacaaaaaggttccgcagggaactttcagaggcttataacatttatctctcctccatgcatcatgaaggaaagaaagcttatgccaaaaccaggatctaagagttaattattttcattccttacctgtacagtagttattggacttatgaaacctatctgtaaagatttccaaactcagcaaaatgtaatttatcctttctgatgagggagtggatggttgccagagcacaccccatgcgactgttctccaaagctggtgatgatcatttttaaaatgaacttatatttcattaaacttcttacagaactgctgctaaaagataactttctattgttatcttttattaaatgttaaatgttctccatttctctattcactgaaatcaagataactattaataaatagccagttaatagatgtattgaaatcctacaacttgtacctttccaaacatagcataccttttccaatccaactggttatctaatctttaaaagttaatccccactccaaattttaaaaaggaatttaagctgataaatctgccaattcagactcaagactgtaggactttctttgcaaaggtatagatctgaggcttggcccagtgtgaaagattcaagtaggaatgggattatggtggtctctccagtgtggcttcatgttggccatgataaagtgttaaaatgttttaggagtgttctgtgatgcagtattcaatttctattataatttctcttaactcctgtacattgagactactgcttatctagaaactatattcaagctattttacctgaaccattgatatctgttgaagtggacaagaacctaaaatgataactttccaatctgctttagcccacattagggagactgtgcacctagtcttgtccctcagacacctgtagaatgtttcctacatgcctgaccaaacacaacctttatgtgcctcccaataccactgtcacaaaaatactttttcctgttaaagctgtatgtccagccatcatctacagaaatgcaagttaatgagccagttgcatttggaactaaacctgtaaaatatgtttttttaaagtttcataaaaagaaattaaacttcactttcattttgtagatacactaaattatctgatcctgccaattggctaaaaatagatcctgtgaatggacaaataactacaattgctgttttggaccgagaatcaccaaatgtgaaaaacaatatatataatgctactttccttgcttctgacaatggtatgttcgctgttttttcttgtatgttgatgaaagacagtagatcctcatcatgcatgctcaggaattaaagttttctacaaaactcaattgcctggaaaactgacttttataattccgaggtccagcttttatttatcatttcagacaggtgttctggaacatccttcactgtctttgcaatgactgttctcgatgtccatccatcgttcatgtagacatacctttgttatcttattgtcctgtcacatgttgatgccttaagtccatcctcagtggccctagacactgggttttttcagtggctctttttatatgtcttctagtcactctgttgcctttcatatgtgcatctctatcagtcttcctttttataattctctgcctctgtctgccatgggctaggaaacttaattttgtgcataaattgagataagtgagtagtgagcttcagggtatgggttttagaatacatatgtagcacctttttttcctttctgagtctctgctggtttctcattggttaagattaatagataaggacttttttcagatatgtaatataaaggggacttttgtaaacctgatgaggggcttattttgcttcgttagctctcagtacgatgtgtgtttcagacttcaagctctggagttctacaggacccccaggtgcagactccggctttcccactttgaatctgtgggattgccatgaggttttaaatatatctgtttcctttttttgttaaatagatacgtatcagcacctaactcagtgttttaactaaaatgtaatgacttctacatatatatgaagcatttgaaacagtggctgacacgaactaaccactcaactaagtattcctattgcgtattaatagtttcaaaactgaaccacaactatattttaaaatattttcagtattaaactatgaatatgaatgttggtacttaataaaaaatagcaggcttcaatttggtggttgaagttggtgtttgcaattttcaaattgtaaaatattttgcattactaaaataagacatatcaatactttaagaataatgtcagtgaacctttctaaatctgtatactaagatttaatgagattactatctgtagaaaatctatgtagtgaccaaccaaagaaatatttcttatcctttttaatatgggacctcttgtttaaatatttagtgttggaactttgtaggaatagcttttgccattgtacatcaaagcatgtcattagtacctgttttatgcttttttgccataaaccgtggctttcttctacagtggtactgaaagtaatgcatcttgaatcattatgttaagatctaaagagccataaaattatatgtatgtatgtatgtatgtatattggttgtgagttacaaccagatttctcattcaccaggaaggattgttttctaattgaaagggcttttgataagagagagaagtgacctgttataatgtatgtagctgtgatgctttgcaattgcactttcctttaagccacaaggctagacttggagccccagctctgttcgttaatgattagtcaagctcttatactctgtatgccttagtttcattattgataaattgtttcactacctacatattctatatagttgttataaaagtatagtaatattaaatgtgatagtaaatttcgaagtccctcaaactgttgagtatcatagtggtcatggtggtgttggaatattgtaacagccactatacccttccagttcaactctccctgctcttagaaccatcatattcctcatagaagttggtaaacattcctccttattccctccccaggattgtgtatgtatgtgcaccttcctagttgcatgacctttggcaggtcgcttaagtctctggtcttcagtgtacagcattatttataaaatattcataaacatattatatatttgtgtgtgtgtgaatatttacaatgtagcagaagcaaatcaccagattaaattatcacacaaagtggtggagacagcattttattatagtggaatgagaatgggtttgaggtcaggccgaccaatatttagtagcaactccaccacttacaagagtgtgtggccatgagcagtttacagactcaggttcatctgtgtaaacctgtgtcataggattacaatcaaagagtgtacatagagcagcctaatatgatctcaagcaggtagttggttggttagtaaatatcatttctcttctgcatgatgttccttcctgagttgaggtctgtggttctgtatcacttgtctgtagactgttgcgttaagtcaaagctgtgttagagcgttaaaagcattcttatgttctttcatgcatatgtcttggttctccataaaaagaatagtgtcaacaggatcacgagccctgtgtttgcatctccaacactcctcacagtgcctggaggagcatggtctacgcaagccctgaataatgggcaggaggggcagggagggtacgggattccatcacaggggcattcttcgtcaccttgctcagctcctgcagagcagcagtggcagctcagggtcattctagcagggaagcaagaaggggctttgttctggaaacggtctgcccagatgccatagcaactatgtttttccaaggttacacagttaaaagggccagaaggttagaagctttgagaatttcaccataattgaggctcattggagagaactgttcagcatcatttgtgatttttctctcttttcaggaattcctcctatgagtggaacaggaacgctgcagatctatttacttgatattaatgacaatgcccctcaagtgttacctcaagaggcagagacttgcgaaactccagaccccaattcaattaatattacagcacttgattatgacattgatccaaatgctggaccatttgcttttgatcttcctttatctccagtgactattaagagaaattggaccatcactcggcttaatggtaagaacaggttaattatttgaatatatgtgcagttgagagattttgaagcctggcatgaaaagttaattttatgtgcttcataatcttctcattatacatattttaaaagctacttaaagtttaagtaagatattaaaggcctttacggccaaaaaagtatttagaatgcagcatagttgtaatccgctttatgtgtactattaggtagtaaatacatcctgaacaatgctatgtgtttttttatcgctttaagtattacctatcaaactatgtttttcctttttcatataggtgattttgctcagcttaatttaaagataaaatttcttgaagctggtatctatgaagttcccatcataatcacagattcgggtaatcctcccaaatcaaatatttccatcctgcgtgtgaaggtttgccagtgtgactccaacggggactgcacagatgtggacaggattgtgggtgcggggcttggcaccggtgccatcattgccatcctgctctgcatcatcatcctgcttagtgagtacttttattgtcttttagatttcagttctcttggcttctaggatgttcagcaaagtcatgtgttgctattgcctggcaaagtagtctaacaaccctttgacctttcagcatttcctcgccaatcatatatgggtcgaccaagtccactttagaatgaaaaaaccccagagcattgtttcaagcacttgatgtttgcaacaagctgcctcagcatgcctcttccttgccctcttaccctttctcatgcttattgcttagggagctgtagtaaacgcttttcatagaaaaacattaaacaatcccaagtttgagcacttttcttatgatttgagtatgaatttatggcacgtagttgatgatttaggaaaataagtatattgctttccttcaccttccttcatataaagcacagtcagcaacgtgctccagtcatgcgaggatcaaggtatttgtttctgaagggctgtgtagaagagtgagagattgtacttcacatacaggacatttgataatagaaatgattacacagctcagtagattgtctgtctttagagtaagtgtagattaaggaattgcttctttttaaggtactttgcaatctttggttcaatggaatgcaaaaaattaaccactggaaagtactttaggaaccacttctaagcatgcaggttaaaagaataaattgcctgggccctgtgttttattgtgaatagcagcaggacttagtttattgtgcgatcatgctatgcaccaatcactttcttgaaaatgttggccatttcttttatgttttctccatttacaagtgttctggtaatttagaattctgtccctttattctaagcaattactatagaagtctaagcattttttacttcctgtgtggagactactttggctataatttgaaacctgcatgctatactaataatccacttgctagatttagccctggaacaatagcaaatgagatcatgttatctggctttaaaaggaggatatttacttttatggccaataataaaaatgtgctccaataggagtcattaaatcttttgcttcaggatgtaaactgatacccccagattttagatagaatttgttcctagatgtgcacctagggatatgtttccatttcaactgaaatgtggcatagatgccaatgttatcaagaaagacttaggcatgatggattatggcaatgaagaagtaactgacattttgaaggaaactgaattggtgctgattttaacatcaactcactggaaaatttatggttctagacctggcgcaaagtgtaaaacatgaaagtctaatattatttcagtgttcaaaggaatcccctagctttcttagctgaaacatgcaccggcctctgggagtcaaaacctcaagatctgattcctgacttagttccaatttactacccaggtcatctgggcaagctttgtcctcctggataagtgttttcttctgtgaatttcggagtgtaatgatgactgaccaaccgaaataacacagcaagtaacaccttactgctgttttgtgtctctagaatttacaaggccctatgaagggcaactatcctctagcaagccaaagggaagatagaaaaagttactgtccccatatatggatggtaaaactgagaacaaggatgatcacctctcaagtgagtttgcagagggcaccagggatgggagcccaggccttcatactctaaacccagtgctttagcttgctttgtcttgtctctcttaatgtgaggccagaaatagatagtagagtgaaagacgcatttcaggccttcagttcatataagtataaattattagtactgaatactgtgactaaataggccaggctttaaaaatgacaatattatgtatttttactatttttctacctagtccttgtgctgatgtttgtggtatggatgaaacgccgggataaagaacgccaggccaaacaacttttaattgatccagaagatgatgtaagagataatattttaaaatatgatgaagaaggtggaggagaagaagaccaggtgagcagtgctttaaatctttaaaaataaattttatgatcgtataaatttaatagtgggaagtgttaatacatcagtaagaaaatggtatcaggtttccctcctgttatcagtcatttggtaaattgtttcctatgtgtgttgaatatttctcaaattttttttcaaagtaccaaatgtcattgtatttattttgtaaaaaaaaaaaaaacaccttgtttcaaaggctttaaacccaattctagttatatctgtgtaatgataaatatactttacagtttctcttcactggatatccaaaatatattaaaagcatcttctactttgggatctggataattatatgtatggtagaaaaaccactaagactatttattccccaagtatttaccaaggaaatccaatatttcaggcactattttaatccctgaagatacctccatgggcagagttaacaaatatctatccttaagagtcttacattcttgtgaaatatttgaagttagagttaacatctagttcatctttgtatttatagtgtctgtcatagttcctggcttgaggtggttattcaatagatgtcagaatctccttctggccattaactaatgtgaacctatatcactatgtgcgtatgggattgcatacctcttcaaggatgagaatgaccataaatggaaaacaaaaatctccatctgctctgaagcaacattttcaatgttatcatagcaaacatctgtaagctctatactacatgtcaggcattctgttaagtacattaggtgctgctctctcttaaatccttgaaacttgtgatactagtactgtgaacatctccacttttgtggtataaaaccaagttaaggatggttagattctacaaaatcatgcacttaggaagtaatagatgcagagtttgcattcaggtttctctgaattcacaggctaaactattctgatacagtttctcttgaaattatatgggcgatattaatgtaatccatgagaaatcactatgacaggtaattcttagatacatttgatagttatctgatttctactggctaatgcaaatgtcggggataacagtctgaaagagaacccaggattctttggttttgcatcagtatcagtaagttaaaatgtactctcttaagtatatatgcagatattattgataagcctgctaattgaataaaagcaaattttcatgaacatatttttcccttgcttcactcctttgaggaaatgatatatcacttttcattttacaaagcacatttacatccattattgtataaactttgtggcagccccttagagttttccattttacatttgaaaaaagttgcatgatttactttcagagtttgtaacccacagagccaggactcaaggcctcatgttctgattccaggttccatgcttggtttacaataccccagctctctcatttagaagagatgcatatttaaagtacgttgaaaacttgactcatgtgtaaagctgttttgaatactgcctaattaaagtggctctataaatataccttagggtgttttgcttataaatgtctctgaatattaaaattcatgtttggcttaattctttaattaatctatcctttcactttcctaggctattttcaagatcaacaaacatattgatcacattctctcataaatcgtctacttccagtattttattttttgtgtaattttgcatactttacaaaggcataaacctaaaacccagctcaattaggcttcagtaaaagtagtaataactgtaagaccaccggtagtaactggatgctgcccaaaattggaggctcagaggcaagaaccaagaaaattctcgtatagggactggaccgtggggtatttaatgtcacctaatctgaatcttcctctcctttccccaccagtccaataaattgtttaatatggccgtattgttatagttatgttaggaaagacttattttatttgttgactttatccacttagattgatgcttgagattaagtggtaaaactcatctattgtaagatttgttaaaataatatcataaatctacaacttcctctttacctaatctctgaagcttgttggcttttggcttttggggtttttttttttttttttttgaccccagccaaactcttggacataaatgtgcttcatatctacttccccacgagtccaaagatttttctggaattctatctgtatcgtactctggggctaatttttttaatttggtaccaatcttcctgtggtatctttttgtagcctctgggttctttgatagcatattagtctagaccaagagcttccgtgatttctccatgcagttctcattctagacagttgtgacaaaattatataatggggtttttatgcatctaatttttaacctcataacagaataaaatatgtgatgtaggagtgccacaccaaggctctttctcctctatctctaaactggttcatgaaatccattcacttatcctcatttccaaggcctctaccttcacttacctccatcctacaacagattcctaaacggtgtcttgtctgtgctttaacatcccaatccaccttttggaacttcttccttagcatgacagctcttcagcgctgcacccaacctttggtttaccccctcatacactaggtaaaggcccatgagaaagcgtcagtggtgggtgcagactccctgaggatgtgaattcatccagcctgttgactcacggtgacttaagtttccttcaaagtttgggtgatttatccttacggtttttaaaggcagagttctgtcttcctcctctcactcttccttcagggataaaagcagctgtggatcttctcctagaaagggcttgtctgattctatattttcattcagttaggctttattttgttctctgctatcttatggtttcaaaaagctttgattgggaacttagctggtttgttcttggcattagagtttgaataatggtctcatgactttatcccaaccagaagcagatgctttctgtagggttaagagtgtaactacaactcacaccaacaaagaacatttccagcaccctagaagcttcccttatacccacaaacaggtggtttgccctctgtccaaagtaaccactcttttttatttctgtcaccatagattagcaccccctgtttttgacttttatgtaaatggatatcaaacagtcggcactctgtgcatctggcttctattactcaacattgtacctgtgagattcatgtgtagaagtcgttcatttttgtcactgctgaatagtattctgttggaagaattaactacattttatgtatccatcctacttcacttgggcacttgaggttttccagttgggttattatgaataaaactgttatgaacatttgtgtgcatatgttctggtgcattttctggtgtgtgcacaggagttgaatgtctgagccacagagtgtgcatatgtgcagctcgactacagtcctgtacgttttccaaagtgatcatacaattgacacctcccttccccactgtggtacatgaaagtcccaattgctccacatcctcttcctcaattagcacttggatttttttcagtcttttaaaatttaggccacattgatgatgtatgtctcattatttaattgggatattcctgcctacggttttacccttttgatatgttatttcatgacgtttgtttagcctgtttgtctacttttctattgggttgcctgtctttttcttactgacttgtaggaggtccttatagattatagatatgtgttccttgttagataaatatattgtaaatatattctctcattctatagcttttttattctcttaatgggtctttaggtgaacagaagtttttttattattttttatgttgtccagtttatcattttttttccattatggttagtgctcatgtttctatttaaaaattttgagtggggcacagtggttcatacctataatcccaggactttgggaggctaaagcaggaggattacttaagcctaggagttcaagaccagcctgggcaacatagtaagaccacatctcttaaaaaaaaaaattgttaattaaccaggcatggtagctcatacctatagtcccagctacttgggaggctgagataggaggactgcttgagcctgggaggtcgaggccgcagtgagctgtgattatgtcactgcactccagagtctgggccacagagaccctgactcagaaaaataataataatgagaaaataaaatgtctaccccaaggtaatgaatccccccccccaactacatatattattttcttgaagctatattgttttacctatcatattaagtccataatttatctgtaatggatttttcatttggttaagacatgggtcaggacttcttcatgttctttatgaatatccagcaccccttggtaaaaagatgatgtttaccactgcattgcggtgctacattgccataaagcaggtgatatgtgtgtgcggctttgtgggttagcttcctgctgttctatgcggtactacctgttctgtctgttcttgagtcaatcccatgttgtttcgattactgtagctttctagtgtcttgaaaccaatagggtaagttttctgactatattctgcaaagtttgtttgtttttagatttttggtggattctgttttactttttctttaagaaaaataaaccatttatcttattttttaagtgtacttactacaagtactccactttctaaatagatgttcttactttaaatcttaaaatcatggtcagttcctgagaagttcagcggtatgaaatacactgggttctattttccataatttacatgtggctgcctgttagaaattctgtttctttgtagtgtgaagtaagaatttttggcaatggaatctaattcataatttttatgaagatactctctttctacaataataggccttggaaatgggactggtgccatgctgtgttctggacaagttttcattgatctttattatccattgctttttttttatggagcctgtgtgtaccttcaggtgtgaatggctggtgatgacgaggtgctggtctgatctgcttcatgtcttagctggacagtcttaaagaataatttttgctgtttctgaatagtattccattgtaaactgaaccacatgttgtttattgagctttaaaagttgtgtagatctcagagatcagtttaagtatttgctggatgccaggtaatgactgtgtttacagcaaggcaggtctgtacagcagtctccagaaaattagcctgaaactggctcagctgagattcctattcttcctgccaagacaaagtatccataccagcagctaactgattacaaagaaaacaaagcaaagtagtcttttacaagggtagttcttatcttacctgtctttgattggagtctctgtctgtataagttctatgtcaaggtacaggttgctaatttctttaacaaaataactaagaggtgcctaagggggtaaaatgggaaaaagaaaaaaaaagaaacaactactccgatatcttttttcttaccttgtgtataacagagatttattagagttcgtggatcttctgctgtggcttagattgtcaggaggctaggttgggcccatatttgaaactagcattagatgtgttctgttgagagtgttatctccacacagggctgttagcggttgaacagacacttttagtatatctagtctcttttcagagagtgaagttctttctttatctctttcactgctaacagcagggctttttttgctggttagtaaggcatgtttaattaccctcattagtaaatgtccttcagtgcccttttggccaatggggttggttgcagatacggtatcgctttcaatgatctttgtatcaagttctttccatatcagcgtcactaataaaatcagggtgaatgtacaatatagccgatatctcactttccctgggaccatcccctttcagccccaggataggaaagagaaactgttagccttctgctttttaaggcttagacttaattacaaacatttatcaagtgtgtataaatggtgctcagtcagtggtgctcactttaaacctctccctacatcacctgacacaatgcagtttcattctctatactaatagcaaaagctgttatttggtgtaccctgtgttaggcactgtactaagtacattatttcgttattgaaatatacattagttcatttgtccttcacaatagtccagtaaaataggcgtatattgttagaaagtagcaaagtgaagattaaatctttgtctgcctcagtgcaaagaaaatggtgtctatcatatcttataccatcctttacaaagctcatgttcaaccaggcaactaaaatactgccttttggaatgccatgcgaatttgtcagaaggctctcccatccttgaagcagaactggaacatccagcagcttcctgtgctttcagaatttgacttgaaacattaaccatcccaaggccttgggctgctgtgagaactcataatctatgaaaagaggtactgctattcatcttggctggggtcacaaatgataattgatagaaactggaacccttcagaccatgagttctggttcaaggagcaatgccagcctcaaggtgataaaggcaggaggcagagaagctctaggcagacagggacgggtccttgtcaaagccccaccttaaagctgaaacgcctggaacctatggcccaaagtgagtacttctgtccctgtttgcctgctctctcatgattggttccttctgaataatgtctttttaccaatcaaatgttaccttttccaaaactacctatggcctgccctgcccccgattctgtccctataaggaccccagactcagccggtagaagagagaagcagctggatgtcagagagaggcatttgattgcagaggagaggggcagagaggtgacttgacttcaggggagagcgacctgcccttcccatcccctttccagctcccctctctgctgagagctgctttcattgctcaataaaattctccacattcaccatccttcagtttgtccacatgacctcattcttcttgggtaccagacaagaattcaagacccaccaagtgtgggtacccaaaaggctgtcacacggacctcttgcccacactggcagggggcagccaccccatgcaacaaggcaaatggcccactgagctgataacacactgctgtctgcggacagcagagctatgagagcattgtaacacgccctctggggccttggggtggcaggcaccccacctagacgccaccacagggcctgcacggagtttgcttctgccagtgccaaagtggccggctggttcccgtgctcactcacctgtgcgctccctcccacaaggaattggctcagcaggctgagtaaatggggcacccctgtcaccagtcccacaaagaggtcaagaaaatgtcctgcatcaaagggatgaggacttttctgtcaggcagagttaacttgtgagagactgaagctgatgctgggcaaaggaggttgtgacagtaaggctacgtggctgtggaaagattccacatcagttttctcttgatcactcttgggttcttggcccttgtgatccaccatgtctcagatctttcttctcatactcaagtctgttgctgactggagcatgacaattggctccgttttcttctcagtctctccaggtaaggcccagcaccccttaggctcagagaacactatataggtttcccattccaggactgagaacactctgcctgaattctgaaatgtgtttttttaagttttaaagactgactgacacctggttcattggggtgttttgttttttgttttttgtttgatctgagatggttctgaaatcacaaagaaagtagttcagtctgttcaggctgctataacaaaatttcataaactgtgtagcttataaacaagacaaatttatttcttacagttctagatcctgggaagtccaagatcaaggcaccagcagatcagtgtctggtgagagcttactctgtgcttcatataaggcgcctttcttgctgtgtcctcatacaatgaaaggagcaaacaacctcccttggtattctttataacggcactaatcccactcatgaagtgtccaccctcatgacctaatcacttcgtaaaggccccacttcttaatactattgtattgggaattcaggttcagcatgtgactttagtgggggacacagacattcagagcgtagcaatacctcataccaacccctgtgttttgggggacatgtctggaagatggattctgtgtcactttaaagtagcattttataaactgagaatctgttcacacgtagtccatgactatgttttcttgagcttgcagaattaaaaatggaaaatattcacataaaattcttgtttcctaatcctttcaaaaagcagaaagatctggaaacatggcctgcattctgacatgacagttgttgggaactaaacagagattttccctctttaagcaggacaagcatgttccagtatttttattctttgtaccagaccagctttcttgatatatgttatcagcccattcttcatagatacttattttgcaggccctgattgaattatacagtaataagtaagtcttagattaacaaaaacaggtttgtacaaagaggaggtgattttctaagacagttttatattgcttaaatgagagagaaaaaaagagagagagaagtagccacacaaatatgtttagccaaaggtattagttaaaataggctagccgctgtaacagactctaaaatttcagtgacctaagtctagttgaaaatgtatttattggtttcttaacattaactgggtttcaggtcgtgggcatttgggatggagaaaggaggtctgcttctctctacacagtcattcagggacctaagcgccaaagactctcccatctttcacatgtgacttctaggatcaccctacccttaaatccatgcaatcactacatgacaacagggcatggaggatgatttttgggagatttttatgggccaggcctagaagtggcacacatcccttccactcctaattccctgggaaataaccttcagtgtgtctagaaagaaaaataaatggtttaagtgatcagctggaagtcttaacaaacccaggttaggtacttgaatttagagaatgtttttggagattgtatgagaaccctttttacctcacccacaatgggttgcactgttctgaccaatccaggtatgtcatagggaagtaggtcccttggcacagaggagatacagtaggcacagctcatgaaatacaacactgtataggcatgagaaacggaatgtaaggttcaccaaaaacaagggaaagcagctttcctttatctgaagaaagcttctagtactttctgtgatactaaagtcttctagatcaggatccagcactggcacatgtaagaaatcacatacaatttcatgataaagggaattataatagaagtgcctcttagtggcctaggttttcagaacccagaagacctagatataattaccatatgagtgtccactgactttttttcaatgaagttgatttttttatgtgagttgtggaaattagtttcaatattgatgtagatgagatccctagagtcttggtgacacagaaagcacattccgccaagtccaagtgcctgagatggggtaagaacccacagttcctatgacctggggtttggcttttaggattgcgaacttcaagggttgacaattcagtttgttctctcattacccctccactttgcattttgaactgcctatacttgcacacctgtaccacactctcacacttttttaacgtagtccatttcttcacctaattctgtttagccatcaagattcatctcaagacatcttgtcttagagtcccaggctaaatcaagtttctctgctctgtgcccccacagcattcccagtctacctctattttgagcttttatgtccactcttggtcctgaccttaagctctgtaaggcaaggacttgtcatacttattttttatttcagtatctaggacagttggcacctggcaacactcatagaatgttagttgaactgctgtgggccctcttcctgaatttctaacttagtttgcaactctatctgtgacttaattgaaccagtatactcccgataacttcactgtcatccttagagatctctgatgtcttcaggaaatgatgatagcattcataaatgctagcattgttgcatatttgttctgtgtcaggcactgtgctactctcttagtttgcatgtcctttataatgttcctgatgactccatgaaatggacactgctgttagtccgttttcaaacctaggtctatgtgactcgagagttcaggctctcatgcactgtgatagaggtcatatgatagatattttatttagtctcactggtctgtagcaggcaggaggtgttactggcttggaccagtatggctaggctcatagccacagcttattagatgaccactggtaatatgactttagaagacataagggtaatcaattgattaagcttgcagaattggacccattttgacattaacaaagttaaaatctggagaagcaatctaagcagccaagttattaaaaaaaaatctgagtatacagtctggagctaaatctaaagtccaggcaagatgcctagacagaaggatgggggcacaggtacaagaaagccacttgagaacaaacccgccacttttctgagtcaagaaatctcttcttgagccaggggatctctgtggacttctgccagtctcgggaaccagacctaatgtgggcaatcaagcccaactatcggactttaagtgttagagaatgaagctgtataatctaactatggtatatttgattgcttgaaataatcgctttataaatttattctgccttttaagcaaacttaacagatggctgaatctggacataactgtggagaccactttcaacacttttattgttggctaaagcatgctttgttaatgatgttcccaagttattcattcatttttaccaacctgcaaacactgttatatattagttattgaaagattctgatttcacaaaaggaaagtttcactagggattgggttagcacattgtcattccctttttgcatgctattctcaaaacactcgtggccagggtacacattagtgggctgtaaaagcatgtgttctgaactggtcagtgcccatcccctcccagttattaaatactttcactgtgcatatgatttgcatatgacttttccttcatcattcctgtcacttcatgcaagtgacacagtattttagataagtcatcttaatatttattcttcctggctgattacaaattttctatatttcgttttagggaaatggaaagttattgatattctactaataacaatgataaagatttgaataccaagtatgtattagtactatgcaaaaaaaaaaaaaaaaagaactgacatgcaaaaatgctataggccagtgttctagcagctaccaaatccaccagctacctttttttttttgagatggagtctcgctctgttgcccaggctggagtgcagtggtgtgatcttggcttactgcaacctctgcctcccaggttcaagcaattctcctgcctcagcctcttgagtagctgggattacaggcgtgtgccacgacgcccagctaatttttgtatttttagtagagacggggtttcaccatgttggtcaggctggtctggaactcctgacctcgtgatccatcctccttggcctcccaaagtactgggattacaggcgtaagccaccgcgcccagcctacacatagacttctgcctcagcctcccacctatttttataaataaagtttactggagcatggccatgcaccatgcccattgatgcccattttttatgtgttatctatgactacttttatgctgcagcaacagcagagttgaaacatcgtgacatggactatctggcccccaaatccaaacatattaatatttactatctagaccctacaggaaaagattgttgaacattgttatagacggatttaatcaatggaattctcattggcttttttgtctaaaagttgaatactattaaggttagcatgggaagtttatgtaatctgctcaaggtcacacagttaaaatatgatggagccaggatttgaatcaaggattttaaaaaatcaaatacttggctccctttgcagtatttactttatgtgtacatttatcctaaaacaaataatattctttaggacatttcaaaatgatgtgtcataaactagggaaggattttgatgctctgccaccatattctcaaccaaattacctatttttatgttttctctgagatgaattaataggtcatgctgagatagagtggctttgatctttatccaagtggtcacattttttgttttttgcaagaagaaattggaactcgaggtgaaaacatggaacccaacatgcatttagatggctatacttttgtctcccaagacagacagtggcttggaagggttaagaaatgtgtttctctttataggaatgtaactggattgcatcaaaacaacgggaaattatttcatatttccagtgctccatctttctgaagccctgttcctctgcatatctgcatcctcccttcttccaacagtacttccttcatagcttctgacatcttcactttccgtattttttgtaactttaaatattatattttcattattttaatttttttattattattttgttgagacagaatttcactgttgtcgcccaggctggagtgcaatggcacgatcttggctcactgcaacctctgcctcccaggttctagcgattctcctgcctcagcctcctgagtagctgggactacaggcacctaatttttgtatttttagtagagacagggttgcaccatgttggccagctggtctccaactcctgacctcaagtgatccacccgcctcggcctcccaaagagctgggattacaggcgtgagccgccgcacccggccaagctgagctgccgtacctggccaaactttcattattttaaaatatgtccttttaaaagacattagagtaaaggctcagtgttgttagtaaccgagtctgtttcccaagagagacccctcttatgaaagaatttgtggaatcaagtctaattgaagtgtgtatatgccacattttcctaaaagaataagccataattttgtaacgggaaataagttgtgataggatttcaacagtcacagtttctaaaatagaagtgtaattttacatcaaagagtgaacctatagctcattcataattctgaaaacaggtagcatgttaaaggaaactgacatgtcagcattaacagtaagccacaggggcagaaacaatgactgttcccttttagtggggactcagtcctctcccttgtgggaagtagaaaactggctaccagtaagattaaaatgtatagtatatgaagagagagaacagagatccttcatctgtatactgaaagtccccaagttattttatttgtattaggtttatggttcaatccagaaaaagcttttagcaaattttttgttggtgggggggctgtgataatccatggaatctacttagttttccacatcgtttcacctgtgaagatagttaccgtcataacgatatttcactggggaagaaaatcaggtcgtaatgtaatttacataaagcttgcacgggtatatttgacttacttgtcagcagttgtttggtaatatgttgacaccttatcactattttattcaattattttaatgccgggagctatagagggtgagataatagtgttcttctctcccaccttccatttctttttgtgtctgaagtttcttgcctgtgccgcagtcagcttttttccagatattttttttccttcagaattttgtccatttacttccatgtgagtattttaatttctctcagtcactcagtcttgaaacatttttaatgtttaccttatctatatggggattttaaagtcatttgcctttgcagctataaaaggaaaatgttccacttgaaccagcccatgcctaagagatagcaaaactgttgtgtttcatcactggttctaaccagtggaggctgataaaggcccgtgaactttaagtgtccacccctctcctccatgtgtcagactcttatttgacctaagtgaggattccttcctgcctaaacaacagttagtcttattttaaccaactgtgcacagaccgaagaactcatttgttctatgcagagtgctagtgcccagtgactgattagtggaaccatcttaaactcccccctccagcacttcaaaccccagatgttttccccctcagtaaactctttcgtgcatttcttcactggcaagtgacaaaaagatgcagctttttgattatttattttgcttgccctggtgggctctgtgttatcttttgacgtgcttaagtgagtctgtgaccttggtcaaatcattaacctccctgagctgtggtaatcaatagagtgggaacaataacacccacttagaagggtttttgtttgtattaatgcaataccacatgagaaagcacctaatgtaattcttgacagatgatgagcaccagataaaggttgcttgcttgctttcttgctctctgacctgaaaatggcatctggcacccagtagacattccataaatactggtggaatggtaaatgagtgagtgtttgcattactccctgaaatgggttgactatacaattctgtagattctacatgcaatgtagtttttggaagtatttgcctgggattccagaatttcaatttatactgatgcaacattttattttattgtagcataaccaaatgctctgagttaaactcgttgtatcattttccaaactaattataaatcattgcaagtcatgctaacttcttactaactcccccagaactatatcgcccttaagacattttaaatcatagaccaaaaaaaaatttaagttacttgcagtgttaatattctcaaaacccaaattccatgcctacttttaatgatgattgccaattaacacatattccaaacattaaaatgaagtaaaaaagagattttccttggcctttgtttgaaaattgaatttctttgggaagttaacattgtaaaggttggcaatcataagagaattttcggacccactctttgagttttaggagccaaataaagatgtctttttggattgtttataatcttcaggagtaaggccatgaacccaatgacgttgagaagatttttggtctttgtaattctctttataattctcatcctacatgttgtcatttgtgtgtttatgtacatcattatgggattgtaaagatgtataattagggagcgttttttatcaaaaggtctaaaattagactctcagttcaggacttttgccatacaacacagatagacgtcaacagaagagcccaccctgtggccggaggatacttccacacgctgcctgccatcatcagatttttatgtcccatatttgcagtagataaggagaagccatcacagagacactctaagccatgtattttaaccttgtgtctaacttcctgtaaaccagtgattttttgcctctttgtggacaccatcaccgtggaggaatttaacaggcttccatcattatggggtgattcaccatggcaatgattctcagcaatgggaccaggaggtctttctctcccgtctcatcataaattattactatagtgtataatgtgatccaagtcacatttcttgaattagctgctcctttgatatctggcataagtatcatcactgagattatgttcaacactttttttttagtgggaactttctataagcctgaaacattgatggtccaaaggtctaagcaagaccaccgaagttttaagactcttcctgctctctggttcttaagatagtaggaaaaagctatcaaaagaaagataaagaactgtaaattatttgctattatgtaagtatgttatatacacattcatctatgaagcaggttaggaggctatcctttccttgtccagaggggacaactgctctcagctgtagcaaattgttgtcagaatgtaagatctcttttgccagatcttgttattctcaggtgagatacacctatgtctaaatgttggtgacctatttgaatatatttaaaagtctgctagccaatcaaaatgcaattttatttgcagcctctggatacagttggagttatagaagaagtcagagtagaatggctcttcccagatagggagtagcatgagcaaagcccacatgcctcttttatctccagttatatgaacgaaattcctctatattcttatatttgtcaccctgagctattatgtaatatatccaggagtatcaaagaatatgtcaccaggtaaaagacagtgcttaaacataagattcaattacctttttgtgtgtaatttagacttctaataaaacatttttcacccttagggtaaaaacatttattcactgtcatcaatatacttgccatctattttcccccattttaaggacagctttggtaattgaataagaatgcatacttattcatagttcaccccactctgttgtgcttggtagttatacaattaaacatggcctggaaaaaacatattttattttttagtgtgaaagcattaaaatttctctgaataaatcttttttttttttttttttttttttttccttttagacagagtctttctgtcgcccgggctggagtacagtgatgcgatcttgtctcactgcaactttcacctcccgagttcaagcgattctcctgcctcagcctcccaaataaatatctgggactacaggcgcccaccaccacatccggctgatttttgtattttttagtagagatggggtttcaccatattggccaggctggtcttgaactcctgaccttatgatctacccgccttggcctcccaaagtgcaggggactaaatccctctttttgtcgtgtatagcattttaacagttcaaggactttcacatctgttgcatcattgagggccttttctgagatattccgtaaataactcaaattctataaaattgaaaatggagcacatttgtgcaagatcaaggtgttttttctcaagttttgtatggatgatttgaaatactccatcttgacaagagaaagcagcattctgatgcctttgctcctgctgtggactctcccaaaatggcgctttgtcgccagcccatagatggttcagagctaaagctgatttccccctgaacattttatagtttgtgatacaccaaatgtacatcccactctggcgggttcgaagtctctatacctacctcgctttccgcatcacattgcacacacctaagaggaggagcttttccatcagcgtatgtatgtgagtgccttcacctgccagctgaagttcttgataaggaaatattcagggagagtgttgccaggatcagagtatctcaattagcataaattttaaatcaggtgctatgaagtcagacactcatggttttgattctcattttagtcatatactagctgtgtgaccttgggcaagttactcaacctgtttctccacctaaagagatgatgataaaacatttttcatgggtttcttaggcaccattgatagtgagaaaacacttatcaagagtctggtatagtgcctgacccacagtgagtatgaagttactgaccttttccttccctttgtctccttgttattttaagcattcctcacattcctgtccctccaagctcaagctcgtttatctagttccttacctttaaatccaaccttgtaactcagtcttgatttactcatagatgattgtgaagagagccaggctttggaatctaatacacttggagtcagaatccttttcttaatagatctgggaccatatgcgacttacttgggttatttgaaactcagttttctcatctcttaagtggggataataaaacttagtatcacatgtactaagaggatcaaatgagtgaacatatgtaagacacctagaccattgccaaaacatggtaaacgttaaacaactgtcgaataaatcaaaatcactctagagataactgcaaaaggttttaaaagctagtttcagacagagagatgaagcctgaactaagaaaagcataactacatctatgcttgctgcaaatgtcagttttgaattgaaagaatgttgggtaagcttggggatatgatattttgtatcaccagaattcagaggtttgaatactaccaactatttgcccaaaccttaaatgtggattatttccacattgtagtctctttctttatacattcctgtccagatgtctgagctaaaaatagttctgagggcccaacctatggccagagcatccttcttcacaagttgtactttgcctctctgaaagcggacagattgtttttccaggacattcccacagggcagcattggaagaaaatccaccctctctctggtctaccaccactaaaccagaggtcagcaaacttttcctcagtagggccagatagtaaataatttaggttttgtgggccacatatattccctgtagcacatttttctttgtcgtttgtattttaagtaactttttaaaaatgtaaaagctaatcttagagaaaaataggccataggtcacactgggcccagagatcatagttttctgacctctgctctagagtttagaagggagagagagaaggaagaagggtggcttgaaaccttcatgaactaatgccttcctttagggaaaaggaagaataaccaccctcgttttaaaaaaatattaaagacatgaagttagcacctttgcttgtatggtacaactatattgtctagtcggttttttagttgttttatagtgagacctcatcacactgctgtttttcattggaaactgatgaggaacattgtaaagcagatggagcacagactgtagaaatgaaaagcacagaagaaagagctgtgtgaaagaaatatttaatcataacatgaaaaactcatagtggcaacttttccattatgttaaattttcctcatttctatgtgttctgagtatgtgcttaaaaagcgaggttgtaattttctatctttgtgcccatctcccatcggtttttgattttgtctttttgcaggactatgacttgagccagctgcagcagcctgacactgtggagcctgatgccatcaagcctgtgggaatccgacgaatggatgaaagacccatccacgccgagccccagtatccggtccgatctgcagccccacaccctggagacattggggacttcattaatgaggtacagagagacactcgttttctctataagagttttcatttcatgctaatggttagatctctgtaggccacaaattgcttggaatacagctatatagttcactaaaacatacttgtgtttctgaagttcatcttgtgtgaaagcaaatgtggcttcattaacaacaaatgtaattgctttgatcaaccaaaaagagatctatcaattaagattctgcatttgtaaaatgacatacatcatatattatcagaattagtcacactgtctccgagaaggattttttttcctagattacaagtaataaatagactaacaatattatagtgcattctaatttcatttattagcattaataaatgtagcagtagttcactttaattttcctcacactgtaccctttgaatcccacaaatcgtgagaattcagtgcctgcccaatgactccatcaaaagagattagttggaagagctaaattaaatattatgtaagtgatttaaggacttgtctagttgaggagttttaagagcttctgtaaaaggaagctatttctctgttgcatataacagatatgattttcactgtcaaaattattatgacattctttattactgaccaagagttctgttacatttaagttttgaagttcaatgatttgtgctgctgcttctgatcatgtctgtagtcttactgtaattcttttgaatttgtattgtgaatgtaagagaacactacatattgatgttgactgtgaatatatggcagaactcctgttttctggtcatatcattggtgtctccaagatcagaataggtctcagtgcattacaaagtggaatgcatctgttggatatggccttcagtcataggctgataagactcttgtatcctgggcttcctcaaaattcatataatattaaacataatctacattaggtttttagatatacttattgcttgtagaaaaagttttaaaacaaaattggaatagttgcctgtctctataactatccattactgtctgttcctaaaatatatgctgcctttctgaacatatgtattcatttctgctaaataggtaataaggttaatttgtagttgacatgatttaaaaacacatggaaagcaaaaacaacagaatgccagtaactccctttatccacagaaatatgtcctgactttgccagctcttagttatatatagatccagttaggagaatttgcagaaatttatacatatatgcctagatcttttagaaaaatgtaagagtgcctgatgattttatttctaatttcatgtttgtcatcataagaaattgttgagttattctgatggttgtcaattcaagttatagtgaatcttctgactgtaggtttaggaactggaccttacaatttttttttaattttttttggtttttgtagagacagggtctcaccagcctgtttcccaggctggtcttgaattcttgggctcaaatgatcctcctgcctcagactcccaatgtgctgggattacaggcctgagccactgtgcccagctggaaccatacttttttgaagccagaattctagcttaagtataatttaacaaatccttactaaatatttctgcctgtccctgaagtaccagtgttctgtggatttcattccatccctgatactcttcttttctcagtgctaaagatcaaacaaacagtaaggtttatttataaaggctattcctcatctgattcctgccttcttctacccctcacgtccccacattccctttctgtgctgcagccccactgaactatttgcagttcctcaaaagcatcaacacttttgaatatactgtaacttcggcaaagcccttaacctaattgtccatctgcaggactgccacttcgccttcaggattcagccaaaacatttctctgtgaggccttccttgatgcctgtgggaagggataacaagttgcccctcgggtcatagccctcaccagctggggtgtaactgtcagtatttctttctcccactcagtatgtgagttatctccaggacaagcgctatttcttgttcatgtttttataacttaaacatctagtatgttacctagctcttagatttttgtcattttcaggcattcaagtatgcaccctggcaaatgtgtagggcatgatgctattgggcaccacccactttacatctgattgagattcaatggatactgagtctagagcctttcatcctacttgtcagattacattcaaattctgagtttatgtttgagtgtgtgtttgtttgtgtgtgtgtgtctatgtctatggtcattgattttttttttgttctttttttaacaatgactatctcttcttcagtagacatctagtcaataagtttcacttacccaacccttctcggccacagtaggagttacagtaggaatttccatttggaattttctttctcctaaacagtgctcaggtatacagtttattatggctggagaccattaacaaacaggtatgattacttatatgaaaaaccgtcttccaaacaactgactgcaaattgacttccagaatacaatctcttcctaatttgaagattatctgcatatgtgaaaaatgtctcattgtgaaaccatcttgagctcaatgtaagatcatccattcagcaaatcactattgaacatccatgtgtgtaacataactgtgcaagtaatatatagataaaagcataaattagacatcgattctctttgtgtgtataccctactttgttgctagcacgatatttgtgcaatgcaaatgtgccagtatccgaagccttatttgccaggcataggaggccatttgtgtctggttcttatttggctttccaacttcatctcaaggccctcaccacccagcatcttgcaggctatctacagagaactctacttgtcatttacaatctcagcttacaatttcatgctggtgcccatctacaagatgttcttcctgtctagaattcctttcccatttttctagcgttgggtgaaattcattaagtatttaccaacccaggaagggtcaggcatacagagtatgggttagacaccatccactggcatcccatggtacccagaactcacctccctcagatcacagatcccatggttccatcctgcctccccctgatccatgttccaggggaggggagacaggcttctccctggaggggccagtatggggcacagtgatttggtgaaccaagtgaatggatgaaaggatccaatttggaaattattctgaaaatggcaactaaatccacgagtgtgtgtttgtgtgtgtgtgtgtgtgtgtgtgtgtgttttaagagacagggtctctctctgttgctcaggctggagtgcagtggcacaatcataacaaactgcagcctcagcctcctggggtcaagccatcctccatcctcaaccttccaaagcgctgggattacaggtgtgagccaccacacctggcctaaatccatgaattcgaatataattacaagatagagaaatgtgaaggagaggagcaatcaaatatcttcagctagaaatgcccctagagttggagacagaaaatctaaggaggtaggtataatagaaaacaatcaaaacgatagttttaaggagatgatggtcagttctgtgggacttttaagggagatgaaagtctaatgtaagtcagaaggcctaagccagtaataactctccaaaataccatctagactctttcatccaagataactgttaagacttgttcagtgtcttcatttactggacagacaaaaatgaatacttacttgtagagttttaaaacagttgaaagcacctagaaagaaagaaaagcacattttataaaaatatttaaaaggcacacaaatttatttatctgcaggtcttatttgatttagcagagcaccaaatgttccaaaggaagaataatatagtggtgattataattggagtgcttttatagatgtaaggaataagaaagctcatgagaacattttctagtttgtttatttaaataaggaatgaatgttgccttgaatctcaaaaatgataacttatttccagtctggtaggcagagtaaaataagtcacatgtttttgaatttcaactgagagtttcattctgttttgaatttttaaacatgaccttcagggagtgaaaagttcaaacaaattcatttaatctcagcccaacagttagatattaatatacctccaataattttactaatactaatcctgtgtatttctttgtaaaaagaaataaacttctttatatatatacgtgtatttttctgttttcacgctgctatgaaaaactgccaagcctgagtgatttacaaaggaaagaggtttaatcaactcacatttccacagggctgggaaagcctcaggaaacttacaatcttgccagaagggaaggcaaacacattcttcttcacatggcagcaggagagagaagtactgagcaaagggagaaaagccccttacaaaaccatcagatctcatgagaacgcactatcgtgagagcggcagcataggggtaaccgtccccatgattcaattacctcccaccgggtccctctcacaacctgtggggattatgggaaatatggaactacaattcaagatgagatttgggtggggacaaagtcaaaccgtatcattgtgtgtgcacacacgcacatatacacatatatcacatatacacatatatacatatataaatatacacttatttatatatgtgtatatacaaatatacacatatataaatatacacgtatttatatatgtgtatatacaaatatacacatatatacatatataaatatgtatatttgtagatacaaacatacatatataaagagatttttattatgtgtgtatatatgtattcattagtatatgaagtatatttctctactcaaaagtataaaaaccaagtgaataattctgttaaaagaccaccttttcattaatattgtttaaaacttatggaagcttcttacaacttgcttgaaactactaaagtttaaaatgcttgtctttttctcctattaattaattttaatttctgttttttaaaatatctcattatggtcttatagaagttgggcatttgtgtaagttcaaatctagccatcccacctaacagctctgttaccttgttacaaggtcaagatccttgcctttaaccttttcagttttcttatttgtaaaatgggaatagtaatagaacctccttttaagattgcgtgagaactaaacgagattatctttgtaatgtgcttcatatagtgcttgtcacatagtaaaaatctcttaattattattggtgtcatattagtaactattacaggtaaattaccttttaggagtaaaagattttctgctgttctctaattgtaagaaaacaattaaaatccactccttctgcatcaaaaattgctttaagtaaaatgaaattcccagaaagaggggtagtaatgttggccttgatatgttcagttctactgtaatgtaagtatggtgtacttttatatccacatatgtcttaaatctagattctagctgtttctgaaaggaatggatataaatatgaagaggatgctgagcaggaaaaactacgcccaggacaacaatgcatagttaccttatagaatacctgttgaatgtcaggcagtgtgttggacagtgagatgtgaatacaaaacagcctctgtagaaagggatgtcacaatctagtgtcatccaaacaagatgataaaagtagatgaggccgggcacagcagctcacacctgtaatcccagcactttgggaggctcaggcaggcagatcgcttgagcctaggagtttgagaccgacttcagcaacctgataaaaaaaccctctatacaaaaaaaaacaaaaattagccgagcatggtggcaggcatctgtagtcctagctactctggaggctgaggtgggaggatcacctgagcccaggaaggtcaaggctgcagtgagccatgattgtgccactgcactacagtctggagtacagagtgagaccctgtctctaaaaataaaaaataaaaaagtagaagggaccagagagaccacaggaatgactcctaagtcatggttggggaaaaaagatctgtgcagtcgaagtgatatttttaatgagcttttggatggatggatggatgggatggatggatattaatcagataaaaaatataagaagtataattctaaaaaaaatgaataaacaacatagaagtgcacaagaacatgatgctttggggtttggggggattccctttgggggtgcataattcagtcgtggttgctggagctgagaatagctgaaacagaaaaggtgggtaaacagtcttggttcactgaatgctttctaaagagttttactgtatgctgtaggttacccaacagcaggcatttgagttaacaccttccagttttttccctctctgtgtacttcttgttattttcttaaactgttcatcaatttttaagttaattttcttaaataattgttttaaagtgttcatgcaccaattaaaaatcattttgcccattgtcgggggaactctttcatttggaaggagtcatagagagcagtcagaggtcttacttgcgggagtgatatcaaataacgtttgagacagaaaccaatagtttgtaggaaagaagctggaacagtgctggagacaggcgaagaccagttaggcaggctttttctctggtccaggcaagatataatgatgacctccactaaagcagtggcactaggactgtagaagacagaatgtaaaggaaacagtaagacctcttttcttttacatccctcatgtgttcctcgctggataatgtgggtttttatcctcataaaagcatgtctccgcccataaagcctgggatcagaagtctataaatacaagctcagcaagaattcagccagagccaagctctctcactctgcagagaagcctcagtctttagaagacagttcagctttatccagaattcaagatctacctctccaggaaaggtggaacaagaggatactttgctaaatttagtcaaacctagagaaacacaggcgtttagtttgtaaatttggtaacagtacatcctgtgaaataatgttcatatccaagaataaaggaatcccataagggagaaccagaaggttctgttgcccactggatttcttctgtacattcactcagatttcgtgcctgttactgtcagtttcttaggacttcagtgcgatctttttagaattaccaaaatattaccaagagtttatataatacctcgttcagaagagtcatattttattctcagataaaaatcagtgctatccaaatggaagggatttaaagtacttaacctgcatagaaagctggcttgtctaagaactcttgaaaagttcagtgattttgcccttttgtaattattaaaacataaggcaatgtgccgtgctctagcatagcacagtggtctctctctaatggattttatggccttaacctctttaaaaaaaaaaaaaaaaaaacagaaataaagaaaacagagatttgtaaactaccaggatgatcagaaagccagggcaggagctaaaaaataaagaaaataatattttttagactctcaatagtggatatgggagttgattatcacaagcattatatttattttaaggaattgaattaggtggcttagtcatttgatgaagagtcctggggtccgtgaacacaccagggaagaccagaccccttcttgtgtttattccctggacatagtaaacacaggccatcccttttttctcctccaaattcagacacacttgaggccttgccattgaccctttcgggctaatttgagtctttttttttttttttaacttgtcattctctttttctttctttttcttttttttttttttttactattatactttaaattctgagatacatgtgcggaatgtgcaggtttattacataggtatacacgtgccatggtggtttgctgcatccatcaacccatcatctacattaggtatttctcctaatgctatccctaatttgagtcttgacctctccatatttccagtttggtgttgacatcataaggattgggccagggctctgtgtgtattttcgcttaataattaaattgtggtaaagcagatgacctgaacaaagtgatcttagccattgtctctgttgtctgtattataaagcaattgtcataatgaaaatttaatatttgttttcagggacccattctccttatcaggaatttccctgatttttcttgttttttcttcagatccttcttgggcctacttgtatgaccccaagtcagacaatgctgaactaaggcaatccgctgttggttaaatttgcagttgctagatcttgtagggaagaggagtgtaggctaatatgtgaatattaactccacgagggcagccattggatctagctcattagtagctgtgtctctaccagttagcagaatacattgcaataatattaatagataatcaacaaatacatcttgaatctaatgaataaacacaaacaaaatgaatgaaggtgcattcttcggcttttgttagctaaggtaccaatcactgaccactccaaaatattgctgcttataataatgaaggtttacttcttacttaagttgtaagtcagctgtagtctgtcagtgactcagttcctgatccatatgtcgtcttcgtttcaggatccaggcagataaacttcccatctggagcaggccattctcctggcagagggggaaagggggattagtggaagggtggaaacacattagatagagttcttgaagcgggtacttttcacagctacttacattgcattggccaaagccagtcagacagccaagccttacagtgtggttgggaaagtaaaccctgaccccagagaggctctgtgggagtgtgggtgtgtgttctgccttcagaaaaagagcagtgaatcactgagggcagtaacacaatctaccacagaagggagttacaagttttgagaaattgtaggttgtggttctcagtcttagcagaattgccttgtagcttagtctaaaaataagataaaatcctatctaaagttatttatgttgtatatatcaaagtattttgctgaaacctgctttattttattttacacaggcttttctggagtataaacagtataaaatgacatgacgaaaagtagtaaagtactgctaaatttcatggattgttagtaaagaggtacctggagatgagaaaactggtcatgtgtacttttttctctgatttttgacgtgagtcaagcagctgccattttgtttcttaaaatatatcttcatcgtttcttattttttcaaatcccaaggcaggacatttttctcaaaacttaaattttttaaaaatactaactaatattcattgagctctacatgtgccagtcactgtggtgagacctcgggtccctttattgcatttggtctttataatagtcctattattatgattacagttgtagatgaggttaagcggaggtcccacagctagtactggggagagctaaggtgtcatctcacagtctgatctcttaaccactacaccatactgattctgaccttaatttttttgctcttcttccctgtttctcctttgtaaccttgaaaggataggtgaacacatgctcataaaaacccatgtatgcgctcataaaatgcatgtgtattggcaggcttgatctctcaagggtaggactgtctgtgacacatcttagataggtgaggccatataagccaactagcatttgacaagtagagtgtggaaaaagcaaacgattgtttggagactaatgttagtgtatctaggagtactagaatggaattgggggaaaaaattaagtagaaaatataccagaggacctaatactaaatccttagaagttttgcagagcatagagactctaattgtatattaaaaagcatctgcttacaaaagttacaaatatagatagtagttatttccttgtttcttttttcttaaaattctttataagaaccagataacgcatgttattttagattgacaggagtcctcctcttttcaatatttataccgtgtacagatattggattatgacatttctaggattttttggaagttagaagataccctattttttaaaataccagtttacaattaattaattccacattttatgctatgttagtcacataaatgattttctgagtacctccctttatgtagtaatcacatctgacctgtcttcagtcttcctttgatgtccttccaaaatgaggtcaaatacaatgctactttctctttgaactcctagctcttaatgctgatgtgaatttttttcccccacaacctgatggcttttgctttgacttcatagttttgtcacttgtcatttgcttcacacagtagtaatacctgttatgctagactgtaagcctgtggagggacatggaccacatggtactcatttgtgtgtctcttgtatttcagtgaggtgctttttttaaatttaatctagcaatgctgctctatatattatgttatttaagatcctttcttctctgcctcaagcagggccattcatttctgccacctgtccaacttattacccagttaaccccctcccttcataagccttggcctccctgagcttgactgcttagggttgtttctttgcaccggaaagatataagttaatttttgtccaactttcaaatggttatatctcccttttccatgtgttgaaaatatggtatgtaaatggaaatttacaaacaagtgtttgtttgatcccgtgaattcattaggatctgcttgtggttttgtaaagtgtaaccctctcttaattctttcattctttgtgtttccaaattgcagggccttaaagcggctgacaatgaccccacagctccaccatatgactccctgttagtgtttgactatgaaggcagtggctccactgctgggtccttgagctcccttaattcctcaagtagtggtggtgagcaggactatgattacctgaacgactgggggccacggttcaagaaacttgctgacatgtatggtggaggtgatgactgaacttcagggtgaacttggtttttggacaagtacaaacaatttcaactgatattcccaaaaagcattcagaagctaggctttaactttgtagtctactagcacagtgcttgctggaggctttggcataggctgcaaaccaatttgggctcagagggaatatcagtgatccatactgtttggaaaaacactgagctcagttacacttgaattttacagtacagaagcactgggattttatgtgcctttttgtacctttttcagattggaattagttttctgtttaaggctttaatggtactgatttctgaaacgataagtaaaagacaaaatattttgtggtgggagcagtaagttaaaccatgatatgcttcaacacgcttttgttacattgcatttgcttttattaaaatacaaaattaaacaaacaaaaaaactcatggagcgattttattatcttgggggatgagaccatgagattggaaaatgtacattacttctagttttagactttagtttgtttttttttttttcactaaaatcttaaaacttactcagctggttgcaaataaagggagttttcatatcaccaatttgtagcaaaattgaattttttcataaactagaatgttagacacattttggtcttaatccatgtacacttttttatttctgtatttttccacttcactgtaaaaatagtatgtgtacataatgttttattggcatagtctatggagaagtgcagaaacttcagaacatgtgtatgtattatttggactatggattcaggttttttgcatgtttatatctttcgttatggataaagtatttacaaaacagtgacatttgattcaattgttgagctgtagttagaatactcaatttttaatttttttaatttttttattttttattttctttttggtttggggagggagaaaagttcttagcacaaatgttttacataatttgtaccaaaaaaaaaaaaaaaggaaaggaaagaaaggggtggcctgacactggtggcactactaagtgtgtgtttttttaaaaaaaaaatggaaaaaaaaaagcttttaaactggagagacttctgacaacagctttgcctctgtattgtgtaccagaatataaatgatacacctctgaccccagcgttctgaataaaatgctaattttggatctggtgactggtttgaactttttcttttctacttgagctgctttgaatgttgcaaaaatcccaagtactgggaacaacagtacaaaaagtatgtatttgttcttgcactattcaccattgaaacgcgtagcatggcaaccatgtacggtgtgcagcagagagaatcattttggaccttcccatcatcatagaagaaaaacatcaagtgattcaggaatagaccctactggtggtgatagaaaaatcacatcctttaccttcagtgaacttcggtgttaattcttaatataactcatgttttaatttgtttctgctcaagttaattgttctgttgactgacaggcctttcccattagagccaccaccataagggaaacttcagtaaagtgggttataggactgaacctggaaactgcagtggacacctggaattcttgtgcaattcattgaagccatcgttttatgtacttagtgaaacacacttagatttgactggcctttatccattgacttgatcatttgcttcagtttgatatagtaatggttgcagagggcaacaaaaggaaacagtcttgctaaattttgtaaaattgtttatgtatcttactatgattcattctgaattttaagaggcaaaggaattctccacttgtatttatctgtttgtttcttaatcatcacaccatatagtcttatactgtacacattgaaaacacttatataatatacctcctctaactatattttttgcttaacataaaggttattttatattagaccgtgaaatttacttttctattgattcactttgtaggcaatactttcttgttacttttctaatcattaaatgccagagcttgcctctgggaatttccataatgaaacttttactaaatttgctaatcggaatagtcttttctaaaattgattcttagactgtgcctccatgctgttgtacatccaaatgaaactatattttcagattcacacatcataacacttaatgctcacaccatttagataaacactgtttaaatgattttcttatggttgatgtacaattcacaggccatatctagtgtgtatatgtataaactttaagtgtttgtaaggttttatatatatacacaataaatataaatattaatttttgtaggcataataaacaactattttctttgtaaaaacattctttttatattaaaaaaactaggaaactaataaaaaatggaaacccgctgccatgctacagaaggaacttctgtttagctggttgatctagtttctagtccttccaaaaagcatttttacacacacatgtccataatgattttcttttgtttttatgaaaatgagattgtacattatgtattattctgtaagttgccttttttcactgagtgtatcttggtaatttttccatattagtatatatgtacacctacctctttttaactgctacatattattccataatatgaacataatagttttattgaaccatttcctaattaatttgttgttcccaatttttttgctattaaaaacaatgccacagtaaacatccttgtgcatgtctctttgcatgggaatatttttctagtactagtagagtcttggagatggaattgctggattaaagaatgtggagataagttaaatatggctgaaataataaatgttttagcatgcttaaaagtgccttttagctgaaagaagacaaggctttctaaaagccagtaacttcctcctctggcaaaaggattttgtgcagctcaaaatagtaaccacaaaatgtaagacaatccagccagggccgccttcttttttctttggaagttagcttttgagtcaggccacaatactagtttaaagtattctgtaaaatgactgtaaccatgtgacgtactaaaacctgaaaactatacatttatcaacatggtttatggatcccatccagaaacatgtttttctaggccattcctggtaatttggatctcttctgcaatattgctaataaaaaaacatgcatacagagtgttagtacccctttgaaatggttattttcaatgataaaagtatgtgtagtttaaattttagtaagacgttgccaaatttctctaaaaactatgccaatgtacactcctaccagcctgtgtacaaaaatatatttacactcatcctcaacagtcctggacatcacacacatttaaaagttttgccattatgataggcaacaaaagatacctcatgttaacaattagacttttctgattactaatgaggggattggagatttttttcttatgctcattagccatttgtgtttctttgaattacgtattttattttccctgttgagttatttgtgtttttctaattagagcttatatgcattttttcatgatcttttgctaatctagtaaattttcttacagaaatgtatagcaagtttcatttttatgtggttctcactatgtttgactagatttttgagaaggtcttaacacctttaaattataagatgattattctgtattgttcccattattttgcatttatctctttaatccacctagaaatgattttgtgtgatgcagaaatctaactttctaaaacatttctagataaaggtctgttttccaaacactacttgttaaaaacttcagtctaaacccaaccatgtggaatgcattctttgccatatacacacttatatcacatacacttatatcacttatatctgttttccaaacaccacttgttaaaaacttcaatataaacccaaccatgtggaatgcattctttaccgtatacacacttatatcaaagttatatcacttatatctgttttccaaacaccgcttgttaaaaacttcagtataaacccaaccatgtggaatgcattctttaccgtatacacacttatatcaaagttatatcacttatatctgttttccaaacaccgcttgttaaaaacttcaatataaacccaaccatgtggaatgcattctttaccgtatacacacttatatcaaagttatatcacttatatctgttttccaaacactacttgttaaaaacttcaatataaacccaaccatgtggaatgcattctttaccgtatacacacttatatcacatacacttatatcacatatacttacatcacatatacttatatcacatatacttatatcacatatacttacatcatatacacttatatcacatatgcttacatcacatacttatatcacatatacttacatcatatacacttatatcacatatacttatatcacatatacttatatcacatacttacatcacagttgtcatataagcatgtgtttgtttccggatcttctattccattgacctttaaattcctgtacaatactcaatttttacactaaattatcagttctgaagaagcctcttaaaatttcttacgttctttttttcgcattttctcttgtgcataaattgtagaattattttgtgaagttccataacaaattttattcaaaatttgattgaattgtgaaaagctaacagtttcatttactattctatccaatactataatattctcacttttcacattgtatatactttcatggaatttcactaaacatctcattttattacactctaataattttcattgctattatgagtgggctctactttttatagcattttttctagtgatactttactgctctgttggagatttatcaacttttatttctcctgttactgtcttattttactgttgtattacttttaatagctttttggcgattctcttggattttcctgacaaacaatcataacggcaattaatgacagttttttcccttttccaagatgaatagtattttttttttctgtaccattagtagcagtgatcattacaagcattgttttattattcctgactataataggaaggctttgtatgtttcacgattatgcatagcatttagtatagataccagtttatacttcacttaccttgaaattttgtatgtacatgttgaattttataacactttcttcatctacatagatgattgtgtattagcccattaataagagtgaattacatcattaatgccattagattttctaatattgaattgaactttcctggaataaacctacttggtcataatgttattcttttaatgggttgatatattttatttgctgctatattactcaggaattttaagttatatgtggttatcttatactttgttttttcaatattttgctcaacgttagtcttaggcttatgctagcctacaataagtaattaggaagattgccatttttcctatgctctggattatatacatcacaatgaactctccattaaaaatgctcaaattctcctacaattttatcattttggggataggttttcttcagtaggaataggtataattctgatattgcacttatttttgaacatgtttcacaatttacattttcctgaaaagtctcttgcagaatctagcttttaaaaaatgtatcaatagaaaattccatacagtattatcttcataaaatctgtatcataccttaggttatgttttctttctcccttttttcttttttacttttttcttcatcagggtagtcaaatattattattctattaagagaaccagctttatatttatcgatacagaatatttattcatttggttattgggtacacatttctccaagcctattaatttgtttttcagatactaatgttttacttccatttggtttatcagttcttgaaagggatttattaacatttcccatgagctttttggatgtatttccagaccatgatgatatgtgcttaaaacttggattgtaacttttaccagtccttgctcagtaactttcagtaccttcagttctaaattccacattattccatattaatatagccatacctgctttcttttgctgattttttgtttgtttagccaaatatgtgtgtgattttagtctgatgtagcatgtccatctcttcattgttaataacttgaataatttttccttctacattttaaacaacatgtatgtcctaaaactttcatttcaatgccattttcaaacagacactgtaacagtggattggtaaaacatcagtccagacaatgatttgatttttgcagtttacctccttttaagccaataacaatcctgcattttgagttgtgacctcaataaactaggctctcactggttgttcccacagctcttcagggtatctccaggtcaccagcgtgttaatggaccctgatggtattaaaaagaagagacattcaacaaccaggctccttttccctctcatgtttaccgcattgtagctttatgttttgatttaaaagttttttccttactggggggagaaagtatcatttttcatattcaaaggaaaagttggaagactaactcataaggaaaactggaagaccttagagttcatgtgatcctgaactgtcacttttttgactcatacaagatgactttgagatcatacaaatataaactacctgacagttattatcaccatatccttagcaacaacaagcaaacagcaaaaaaaaaaaaaaaaaaaaaaaaaaatcttccttcctggaaagtatcagttgattgacccccattatgaaaggactcagaggggagaaagcaagagcacttctcttttttttcatgcagcaaattcagtcttacgggtcttgctttttcattgatcgtcagtacttctgtaaggtttgtagtaagaactcacacatcaccattttttctgcttcttagcctaattaagcactgggtgggtggaaaaagatgatgctacagcagctaaaacaagtttgagagagattatttgtatatttaaagcaattccagtaccttcaatttctagtacaacaaatggatatgctaacgataggtacaacttaaaatctgagaatatatattttatgattgttttagcaaaaactaagcctacatgagaattacagtttttttagacagggtcttgctgtggcacccaatctggagtgcggtggcatgatcatagctcactgcagccgcctcaaacttcttgggctcaagacatcctcatacctcaggctcctgagtagctgggactagggtgtgcctggccttttttttttttttttttttttagaaaggaagtctcactatgttgccaaagctggtcttgaactcctagcctgaagtgatcctccacttcagcctctcaaatcactgggattacatgcaacatgagccaccacacctgacctgatattttaagtgcccactcttggatgaggaggcagaaggaggagaagaggtgaagcctgttgattagaacatgtttgtgaatcagaaacatgatgggagacagacatcctttgaggtattctgttactgtaagccaacatatatttgatatattagattcatttaatcaggttttaaactttggacatgctgacctcgagtaattcaaaaaagtattcatatattcaggaattcaggaattaatggctaacttaattatgaaatggatgtcagcttctacagtaatttacttgatctttctctgcaactaaggaacattgaataaaaaactgcaagtttaagaatgttgacctttatcttgtaggttaatacatatatatttatcagtgacagcttatttttctagtttctactttgtgagaaaggtagtttgcatattgaaattttagagtttgctgcttttttctaatagttttttattatatatggtaaagacattttgttaacatccgtggtcagcagcaaaacattgaatgagaatatttttattttcattttaaatcgcttttatattcagaggctgatactattgtaataatttttttgtttcattttctcctgttttatctccatcttaatctttaggtatctaaaaaagcatcaaccaccacagactgacggaaatgttttccttttgtcccacagttttttcacctggaatacctagtttcataccactgcactagtaactctgcaacctttggaataaataaaactaaatcaaagcctcatctcttcaggcctcatgtgaacaatataaattaaagtggacctcttttgtggttgtagaaaacatggcctcagagactgcgttgaaccaaaactatggccagtcttgtgtaaacccctacacagaaacccatccaacaacatggatggattttattaatactgagttctttccaggtgcatagatactgggctgtggacttggcatattaattcatttaatatttatagtaattacttcatcacgtcttatagactcatcattacttcccacattttaacaattctaagatcaagaagctgcatacagttaatagcgttaccccagcaaggtgctgtagttgtgtgaaaactttacgttgatgctttttggtaacatcagtaaagcactagcatcagagtgtctgagtctatgaaatacatattaaggtatataaggtcacttttatttttcctgatttcttgagatggagaagctctattaggagaagttatgtggcttgtccactgacactgagctagtcagtggcagagccatgatttattaagcccaactgtctagctccagagctcacacttacttatctctagaagacactgagtgaaaagacagagggctgagtgaataaaagaaagagtggctcttttgcatagtaccacgtgtgtattagttgaaccacataggatcgccattttggggtgttcagatagtcaaatatttatatacctaaattaaatctttaatttagttcattctaaactctacgaatgaatcacataatttacaaggaaccataataccctgtgaaacacaagcatagaagtgtgggtgtgtggtggggaaggagatgaatgggagacctcaggacaagaggaaacttttagaaaacataatggtttattatactcactaagttccttgactgcttgcaccaagactgacacattcctagcgttcttactcatcagtctctccagggcctagaaagctgccaggcgcactcacacagccactatggacaatctcgttcatacacaaaacaagacctacctaccatctctggccgacatgtttcattttccagttgtaagctgaacaattttggaaatcaaagtaacatttccgggctctgggggaacatgtagtctgctagcagaaactcattttcttctccactaagaaagatgaatcttttcttctgtttctttatgcagcatagcttggataaaaaacatttgtttttctaatatactaactcttggccttccagagcactgcaacatcctcaagtgccttgagaagaaattaaacatggccagaggtacagactggtatgattctccctaggttcaaatcccacctgtgccctttaatggctgcataacttcagataatttgttcattctctctgtgtccttgtctgtggaataggggacacctggagcattgtaaccacaccattacaagttagctattgttatctattattaggaagacatgttcatgtttatctacctacctataattgttacactatagccttttataatttacaaagaaagaaaatgtttcactctcaaaaagctttttaagtttcaggttattctcatattttttcaaacattatttgaaaagacttcagacagaacttccataagaactttgtaattctaacatacatattctttttgcccttccagtatacacacttatgtgggtaagagagtttatcctacctcataaaaaataaaaaatctaagttttctgcattccaggttttgaactttttaccattattaaaagcagcattaaatatgttttatataatttatttggcccttatagtcaagtttatggaagtagaattgtacttgatttctggtcccagtttccagaatgcttcagcacctgttaactttgtttccttaattgccagctctggaagaatatccaagtacatccaggaaacttggaaacacagaaattctgaaaatcgattaaattgcctggaagtgatagatcctaaagagatcaaactttattactctggagattttccttgtggactttggcataaaaagtgcagatttaataactcagctatgttagcagaaccatctattttagcctggctcacctaattctatatctactttctaatatttcccttcttaatagtatcattcctcttaaaccctttggctgcatgtataggaatctttcagaaattaggtcatcatgcaacattaaactttaataactggatatacagggcatagaagcaaatatatctaattgctttcgttaatcagaatcacattctttacaagaacttaataccagtatcatcaagtttatgaaatcatttagcacaactgaagaatgtgaaatgagaccattgatgtgaaggtattttataaactggaaaaggctgtataaatgttaggttttaaatattaaatcaataacttggaaaaatggcatatgtatcataaaaaaggtgggacttggccaggtacggtggctcacacctgtaatcccagcactttaggaggccgagacgggcggatcacgaggtcaggagatcaagaccatcctggctaacacggtgaaaccccgtctctactaaaaatacaaaaaattagctgggcgtggtggcgggtgcctgtagtcccagctgctcgggaggctgaggcaggagaatggcgtgaacccgggaggcagagcttgcagtgagccaagacagcaccactgcactccagcctgggcgacagagcgagactccttctcaaaaaaaaaaaaaaaaaaaaggtgctacttagattgaaacctcagctatgtatgtatgtatctctcctacaaactaaaagccaatacttagctatctcagaatgtactgatggcacaacccagagaaacaggtcagagatggagctattcatttgttcttttgttccaggatatgtttgcttgttgattttgtttttcttgcagttgcaataatttattgtaattatgacttcttaatggtgagacaaaattattaaatggtgtgacaaactgctattttgtcctttgaaggatactgtcttttactgtttttgcatgttaaattgattcttctattgtcaaaccttatttctcacgtgactagtcctctaggaaagatgcaatatgtgaataaatcatgtagtgaccttgaagaatggaggaactataatgggagccaaggagactgaagtcactcattagtctcagggtggaaaaaacatggctcctcaaatgagcataaaacaaaactattgtccaaataaagcacaagaaaaagctccaaagagttggcaagggttctttacaataagaggcatccaggaaggtggaaggacttgatggataatggttgagcttattggccagtgatccctaaacttactacatattagaatttctagggaccttttgaaaatactgcctggctcccacaccaatatacccaagaccacagtctgagcaactgaacccgccatgcaggattacccaagagaagagcgagtctggatttgcctaaaagtattgttggggtctcatctgatttagacagttggtaaccatatggaggaacactaattaagaacctgtcccaggatgggctccaaaggaagcatactgagattgagattagcgtgcagaaagtttatcatgaataatttaaggatttatgtttgtggaaagaaagggaaagaagccagattaggtagagggagaagttgggctgccatgaagtgtcaacaaaggttctcaactgatacctgaggaaactagaaaactatattggtccttcagggtggtcccaaattgaagcccaagggtggggttgcagacacgcctatatagcccagtatagatatgccactggatgtgtgcagccctaggaaggttttagccttgggaggcaaccctagaagagggctgacaactgagggccatctgccagcagtactatcagaaatgggaaagcacatttttcagttttccagaaggtcctgagaggcacaccatagtgcatgcttattaatctgtttttaactttggtaacttagccatttaatgttgcagtatagtaaaaacaaaattaaaccacatagtataagaactcccaggaaggaagtctttgtctagggaatgactagacaaagaagtccttgacttattgggaatgaggcaatgtgaaaagaggtgagctcaagggccacatctgcaacgcacaggaagagtgtggaggtgaatgaaagcagtgatgcctaaataacagcatgggaaagttcgacatcaggccattttacactcactttcaatgtgtctgcagtgctggataaaaaccaccccctccatttctactataaaggtcacgtaggaggttttgggggttttgttttgctgtttctcctttcgtgtgtttctagtgcattgtagaaatcaggtagagattcagcaggaatattagtgcagtggggagtgacagattgaaatagaagtaatgtagctcttaaggacaccaagaccccaggctatctgaaattgcagttatttttatgactcccagggtttacccacagtgattagttcatctatggaagaacatgtgtgcttgatttggtagctgcaaggaagaaaacgtggggaaactcactaggccatcatgtagagccaaattgagaggaaggagcccaggaaataaaagacatgggaaatgcagaatgcattcccaaaaacacacaggaagaaagaaaattcatctgatccagaaggcccacaaacattctcctgacagatagagataggtactttgtataaacttctagggatatatttttaaaatgtgatagcattctttctacctagactgtaaatattataccatttgaacatttgaattccttgctaaaaatacttttgctttccttcgaatatcccaatttagcaggcacgatttgcttatacctgcatgcttctataccagttaattggcgtgtattgtcttaaattctgctagattacacacacagaaattaagcgatgctataacactgtgctgttcagtacttgatggtgaggtgatttaaaaaaaatgtagaggtttcactttctcaagataagggaaatatctagaacataatcaagtataacttactagagtgaaagggtatagtataattattaataattcctacttaatagtcacaagtagcatcttttaaaacttgctttaatttcagtgctctcaaaaatgcttttgattgaaaaagataatccaaaggttgattcattttgttttcccataacattttatcaccttaaaatgttgatgtcagagataagaattatctattataattcacaatgatacaagtgtatgaggacaaacatggtctataaatatggataatatattcaaattatatattcaatttatgaatactatgtgggtggttttcaaaaggtatgctgtataagcccattctcacattgcctataaagaaatacctgagactgggtaatttattaagaaaacaagtttaactggttcacggttctgcaggttgtacaggaagcataatgctggcatctgtttggcttccggggaggcctcagaaaacttacaatcttggtggaaggcgaagggggagccagcacttcacatgaccggagcacaaggaagagagagatgggggcggtgccacacattttcaaacaagcagatctcacaagaactcactatcgcgaggacagcaaaaagggaggtgatgttaagccatgagaaaccacccccacgatccaatcacctcccaccagaccccacctgcagcattggaaattacttaatattatatttgtatggagacacatattcaaaccatatcatatgcctatatttttaaagaagttaaaaaaatattttggtgttttcaaaattaaataaaaacttgcctcaccattcatagcggatgattttctgactatctggagctgcataaaatctttctggaatgaaaaataaattattgattttcttgagaacctaaaataattgaccattagttcaatttatgtcgaagaaagcttgaaatgtagttcctacatccttggctcacttataatcctaccattgtgttgtgcagctcacaggcctttgagagaaatagggaagagaatttagaaaagaaagttagattagaagattgagtgtgtaggttattttcatgttattcagaggtgcatatcaatggtacctgagaccctaaaatggtgtattaaaacgaacaaagggataaattagcctaatgtcataacaataacaatcttttattttgcacatgtttttgttactgatatgctttacagaaattatctaatatgatccaaacctcaacctgtcttaccggtgagtaaactaaggttcaaaaagtatatatgtaagttgcctaaaatcacatagtaaattacagagtttggaaaaaaaacttagtcatgtctaattctacgatccagattttgaaccgctacattttcttttaaatgtctttattttaattataataaaatgttcataaagatggatttttacctctaatatagcaaaatttcaaacttcagttgtaaattttgcatgttttggtaaaatttcaagcttttaatgtatttgaaagttgaccccacaatttcaattctgttaatgttcccagaaaagagaaataaaatgaaatttgaggatgttggctatcctcatatgaagtttactcatattttgaatatgaatgaatgtaactattttgcttgcacatctttttaccagcacattcagttggcattactaaagtttccttttgaattagaatatctctaaaacttgagagtgttttactttcataacaaaatgccagtctcctacctcaagtttttttgagcccaggcagaaataactgaagtaattcaaaagggaggagaggggcggcacagtggctcagcctgtaatgccaatcccagcactttgggagccaaggcaggaggatcacttgagcccaggagtttgagaccagtctggacaacacagtgggaccccatctctacaaaaaatagcataaaataattagcagaacatgatgacacatgtctgaagtctcagctactcaggatgctgaggtgggacagtggcttgagcctgggacattgaggctgcagggagctgtgatagcaccactgcactctgggctgggtgacagagtgagattctgtcttggagaaaacaaaagggagggaggggaaaacagtataagaaagaaaaatacatcagctatgaaagtgtgagtgagaaatagatggttttacttattaaaaggaatctgtaggtagtcagattcacagaataaaggatgctgtgcagtgtagtgaaagagaaaggttttcagccaggagccctgcatttgtgtcccagaatcgtcagttactcatgaatatgcaccatggcatccgcatccttatctgtacaatgagcatataacaatgtctgcttgtctatttaatttaaaaggctattatgagaggcaaaaaggaaaaggtatataaaagacctttgtagaatgtaaatgtatatagatattaattttgatcttctaaccttgactgatggttatcacagcaattgttcattagtgtaagtctaagcattgagtctatcccttcaactctgtcttctattgtcaagaagaagtgaaatgaaaaacataaaaccaaacacatctggacttcccttgatgatctattttctgtcaatattacagttgtgtttatagtgcaacagaataatatagcaattcacataaatcaatgagtgcaagttttagtgaagccttcttaaaagggctttgttaagtttaatcctttaaatgtgaaatgaaaaaataacttgctttttaattcttaagagacaaatttagttgcataagaaactataatgaataaagaaaatgtatttcacattgtactttagcccagaaagatagccattgaacaatagagactgattggacatctgttgtgtgccaagcaccatgctaagcacaagtctataaaggtcattaagacttgtagtctgccctcaaagactttctggtctaatgtagagataagtcatgtggccagacactacacaaggcagtaccatagtggaatggacccaattctactggagctattgaaatgaatatctgacttcatctggcctacccccttgtcatggtgatatggtttggctctatgtccccacccaaatctcatgtcaaattgtaatccccagcgttggaagtaggcctagtgggagatgattgtatcatgagggtggtttccagtggtttagcactatccccctatgctgtcttgtgatagagttctcataagatctggttatgtgaaagtatgtagcacctcccacttcactctctctctgtctctccttccagccatgtgaacatgtgtctgcttcccctttgctttcctctataactagaagtttcctgaggcctccccagaagcagaagcctctacagcctgaagaactgtgagccaattaagcctcttttctttatcaatcacccagtctcaggtgtatcgttatagcagtgtgagaatggactaatacacatggcaatacttactatgagtgtggaaggctaagtttcccaaacccaagggggaaaaaaggaacattcacaaagggaacagcataatacaaaaacatcaaggtgtgatctcaaggcatgttctgggaatggtcaagtaaagcactggagggtagagcagcaaggaatgaagtttgctggaagttggggcagtttcagatcatactcagacctgtgtagtatgctaaagaatttagatttttatgtcttgggttataaaaagctgagtaggaatttgaaataaaggaaagatatcatcaattgacattcttgagtagtcacagtggtagttctatggagtctgccgggcccaaataaaatcttccacttgcttccagtgcagacacgactctgttccagactcttgtaccaaattagttaattgattagttaatttaattaattactggttccaaaaatcctggggtcaaggaccaaagaaaacacagctgtgtgactatttcattgtatgttaatattaataggatgtttcaatgcttacagagatgatgttttatctaataaatgtattattaaaattagtatattgccctttaagggagatgctggtttagaaaatagctgatctttagggcaagaaagggatatcctgctaaaatagaaaaagttctctgaaagaaaatcctgcagtatcaaagagacaataaaccactctgattctgatagagaaagaaatctattccttgcagtaatggaaccttcattggtttgaaaagaaatctgtacctcaaagcaaaaatggcactcagattgctctcagaatcatttcagaaggcaatatggagttaactgacacaacctactggctagtttgacagacatcgatacagacagcagcataaacgacctaaaatggaagccgacagaaccaggaaggaaaacagaccttagaatgaccatatgcatgtgaatgtgtgtgcttcagcacaactgatataagtaaagaaaatggtattaatagaggaatcataatagtatttggtgtattttatcctacgtgtatttgttagaatgaaaagaatataaacaggccagtcatctcactatttcacagttgtgagagaaaaactgtatttactggctgataacatattttctttctttaatttatgttatttcagtgagactgttcacatggatctcaaataagctcttcaatcaaagctacctaaaattatcaccatttgctaatataccatggccttcaagtcaacaagttctgataaatacttatcgggtttggaaagtcttagttaggtataatttcaaatttcttagaaaatatgcattgaggtgtcatgccattttgtttaaatcccaaatacgtgaagcttgcttttcctgaaacaatcattgattcatcagtcagtttcatagcttagtgacttcgggcatccgaaacgggttagaattacaagatgtttaatctctcaaagtaaaagccacaatgttgggcctcaagactacttttcttctaacatagtcaatatttctctctctccctccttttctctctttctttttttccaacctaagaactggaattaagtatattcaaacagagagctacttattgtagcaaaatcataatattcaggacatgctataggggttcaggaataatacatattatgatttatattggtcatgttgatgactaaacaattatttcacaacatacctatacattttatagatgaatagttgaaagtaaagaggacctatttccataaaggccggagtatatgattttgctgaatatgctcttgaaccaagatattcttttgattaaataaataaattccctttatatatgaagttgatcttaggtacaataaggaggacatgcattttggtttggtttatttaatattaccatcagtatacctcctgtttaatggtatgtgttaatccaaaaaagagataagacttgagatgctggcttttcattttttttctacagaaaacctggcccatagagagcttacacctatgaccttggcttcgtgggcaccatgatctcagcaatgcatctatcatgcctgcctttggacctaatgagtatgaaccacattacatcagagaagagtgccagggtcaacaattaatattttagagttacaactacatgtgaacctatgtacttgcattttcagcaatattgcagcatagtattatttatctctaaaataaaaaatgcatgaatatat

SEQ ID NO: 442 - DNA, 57298 bp, Homo sapiens
  source 1..57298: mol_type = genomic DNA; note = NC_000013.11:48653929-48711226 CYSLTR2 [organism=Homo sapiens] [GeneID=57105] [chromosome=13]
gaaatgagcaacctgaattactcggaggagaaaggcaggagagatagaggcagcagaagccagggcagctgaaagacagagaccttcaggtgggcattttaatctttgttttgttaattcagtgttgagcatcatgacttgatgatcacataatagtcagaggagtaattttttaaaagtaaatttgttttgttctactataaatgttattttcctatcatgtacatggtagtttaaaaaatactgtggaagtataaaaatgttgaaagaagccaaattctccaccaaaatagcctctattgatattttggggatcgtccctttgtgtgtgtgtgtgtgtgtgtgtgtgtgtgtgtgtgtgtgtgtgtgtgtgtgtgagtgtgtgtgtgtgtgtgtgtatgcacatataactttagttttcatagttgcgtccctacactatggacaagtttgtattcatttcctccatatcagtctatggtttttccatgttgctgtgaattctttgtaatcataaattaaagctgctgcatattattgcattgaggaactttactatacttcctccatttttggctgttatcctctttttcatagtttgggtccttctattatataagatatattttttccattcagtgtcttgttttaggggtagaagaagttaaatctgagcacatatatttcaatggttttgctcagaggcacaatgagaatgaaagagtatgtgagatcatgagcatataatctgttccttaccccactgggaccctaatcagtgtttctcaaccctggctgcacatctggccagaatcacccgactctgaggagattagaaaattacccctagaataactgaagcttaacttttggagatcagtgagtcatctgcagtattttatcttgttttccagaaacttctcaggtggttctaatgggtggtcagcataaaaacagatgacctaggtcattcaaaatatttttctgtctctgaaatatacctgagagtaatatgtattaggagaaagggaggtataatttaaggcaagccaaccaaatctccctttcaacactacataaataatgcaaattataaaataatttgtgggaaacataagacttctagaaatttctatcatctactcagccacataaactcttgagataagaatctacttgtgtttcgatttactaatgttttaaagagatggatttgtttccagtgcttcggtggttaaaagttagagaagttgaggctcaagtgtgttctaaatgtatctgaatcacgcccatatctgctagaatctaccaaggcagccaggcttccttttaaaactcttcaagattaaacacaaggtgggcatttaatagctggccagttcactaacacactgtgggcacagcgaagatcgatgggattggatttggaggcagaaggtggctcactctggctttcaggagccacatagacatggcatttaccttctctggacctcatatcctcaggaggaaagtggatagagtttatgccagggctgcgttctggtttctcccatcagggactgaaaacagagccacagcgcctaaaccacactgaagcatttgctgttgcactcagcctgctacaggctaggaatcatcccaatgagaccaacagcatgttaatctaatttcttcttgttttgactcagtggagaacacctgtttagtaccttctttaatgaatgtaaacattcacatagtactttactatttacaaaacatgtttacaggcatcagttcatttgatccacatactagccttaagaactggaggatgtaattcttattttaaagatggtaaagatgagaccaagagaacataggatctttcccaggtggaaccagaactggtccaatctggttgagcccagggcacatggtcctttcttacaacttaaataatagctattgtgggaaattggttaaacaaatttcataatgtttatataattggctattctgtatccagttaaatgatgacattgatgttgttagttggcaaagaaaggtgatcatgacacgaaataagaaaaaagcaagatacaaacagcattataagtgtgctcatttttgttcaaaaatatttgtatatatttcaagaaagataaaaaaaccatatatgcaaaattttagctatgtctggttggtggtaaagttcattatttaagtttatttcagcttgtattacattgtaatttttttttaccatgaatgtgtactacttgtgtaataaaaataaatagaattgttcatgtgtttctggttggctcttctccagatgaaatggccccatcttctttcacttgaccataaagaaggctcctgtttaattatctgagttttgtacattattgtcacaaatcttattgtgattgttagctagtactgactgaactcttcacatgtgttgggcaccaagttaatcacttaacatccatttttttttcatcaatactcactccagtgctcctttggcagatgagagtttgaagctcagacggctgcagtaataaaagagactaaaaggcagagttgaaacttaaacccaggtcccttttaactcaaaagcacatgctttcattcattatatcactctgcctcctatccacctgggatcacatgagcagcctccattttggaggaaagatgatatattttttcagtgtactcattgctgtgtacatgagtacatgatggttaccttgggcatcgttagcatttcctgtgtactccagaatcaaagatcctttctgcttttctatagtttgctctgtgcaccagatatctgaggcactctagttccccaagggtaagcctttaagataaaagcctcacaagggattgtgcaattacccaatgaactctggctaatgcggcagccaaattggataatacaaagaaaggcaagcattttgctgtgggtgctcagcgttgctagagagctttttgaaatccatgtcagaaacccctagcactgtatttctttatttctcagggtattggccactgcctcctttgtactgcagttacttatgtacagtatgttctattggaccaagactctgacattggagtcattgcatagaacctagcacataaactccattgagaataaaggcattgtgtaaataaatcaattcacccaatgaatgcagactttattagttacagctaatgtttatctctgttgaactttattaacctctttatattaattgacccatggagaaaatataatcttgacagaatttaaaggaaaacctcttccaatggattgatgactttgtggcagtacagtcagtcttttgacaaagaaatctagttattattcgagaggcccaggataagggtctaagcagtgagttggagtcaagaaattccaaagtcggaagggtccttaggaagagctgggaccagaggcagagttttttttgcctctttagtgtaaagtccttaacggagaggtttcaaaaaagtacaggaagcagactatagaaagaacagaagaaaggagagaaaggagggaagtagaggagaggggagaggagggaaagagatggaaaaggagagaggaaaagaggggaagggagctggtttactctggaagtttaaatattaattaagctgggagaaattaaaataatttagtccaccattattacctacattgtacattatataaataagaatttattataaaaaagataatttcccacgtaagtctcctgccatgaggctgtagaaacagcatcgtaccttgtttgtacctctagtacagaaaaacaatcatctaaagagtatttgaaggcatcctagattcttttttctcttttgtcaaattattatttttaaagtattttaaatttgtataaatttatggattacacatgcaattttattagacgtatagattgcataaattgtgtagtggtcaagtcaaggcttttagggtaaccatcacctgaataacattgtatcccagattcttttaagtaagctggtttctctttattttgagtcttaccttaaaaataaggtaaattcgctgagagatatgtaaatctcttgtaaattcactgttcctttgtaaattcactgagagatatgaaggtgactcccttttagttgtaagaggcacaaatccctattgggaacttgttggcacagagtcagagaaacagtctgctaccctccaagatataaagggtgctgcttcctacagtgtttagaacagagcaccatctgggtaccctctgtggctgccttctgctcccatgccatgccattgaccatttaccctatattcctcttcccagactttagatttgaatttcaggaaaagaaaattttcaaggaaaaacacattaacatcatttcattataaaaaccatgtgagttctttcccgccccccaaaaagatattaattgtaaggcataaaatgagggtgttggataacagcttcattagctcatttattgatctgagcacattcatgtgcttcacgctgtgctagggcctggggtacagcagtagacacgtgcttgccttccatgggcaaacagtctggtgggtagggatagacaggagacaactgctgcccctggagtaaatgctggatgggaaacccaagggtctgcaaacagccaagacatggagggatcagagaagactttttctgaagaaagtgatgtttagaaagaaacctgagactgggtaagcaatagccaggaaatgagctggagctcagaagaaatgggcaagagagagcctgcagtgttgggggttttgaaataagcttcatgagactgagtgtcctttactgaggggatggtggggagagaatatgctggacaacaagatcaatactatgaaaagcctggagatgaacttgactctgagatgataatgggttttaagtggaagagtaatgtggtcagatatgcattttggaaaggtcactctggccactgtgtgaaaaatgaattgagaacagccagagtggagatagggagccattgaggaggctgtgcccattgtgcaggtgaaagatgacagcctgtactaggccggtcttgagctgaccactgagatgaaaggaggaagttgatggaggctgctgggtaaacaggccaggtctgccacagaggagacactgggcagcaggacaagcaggagaggaggagagcccatggtttacttttgctcctggccctctctcctttagatttcagatacccactgcccccatgccactggcagcaggtggggtggcaacaggaatgacaatgcatggtgccaggcaaagtgtagctgcatccctggctgtcacctgtgctgcctcctggggtcctctcaataactctgagatgttgagtactttctgatggtcacacagtttgcacaaggaagagctaggatttgggttcagttgggatttattccagaggttttccatgatatcgcaatgtctctatgtcattttaggaaatacacatgatgtttaacaaactacctttgtaaataatttcttttctctaagaattgaatttaataatggaatatgaaatgctgtctaggggaaatgagaatgagagggagttttaatttgaataaatgggcttgtgaggagctcctgagtcatgtcatttagttaccttgattatggacagggaggaccctaatgttgatcaatccgtagggatttattggaataaacaggacaatgtttctatgataacacttgctgttcttctgtcttggaaatcagagactcagataaaaaacaattctgtgattctgtggtcttccttagatcagacatttggtgaataatagataccgccaacctttctaaatacaaggatgaagtgcattagaaaatgaaaaacatattgttgagatttttacgaaaattaaattcataatcagcatcatagactcatgtgttatattaaccaaggagagctgaggaaagttttgagagccagagagagggcaacatttagtcaaaataatgtttttaaacaaaatgaagccatatctctaagcagctcagggctcttcatatatgatgtttttgttgagttgaatttttgtttgtttatttggtggctgaatgttagtggtaggatgaatgtgcaagagaagctagcttttggagtctattaaagaaggaaacaaggagaattagtaaagacagaggtgggaagaaggaggtctgaggtaatgctgtacatcttgttcttgagggcagaggtgtcccctggcatgtttggatgccaaacttctgctaggtttcaatccctgctacatccctggggataagttgttctctgggagataacagtagatctgccagaaaactcttcaccaatggcccaaagtgctgacttcatggttaagtggcatgtggaaataaatggcattcagaaagcaaagggtcaccagcctggtggccaatgaagtgactcatactttgggggctccttgaggcactttgtgggtgaccgggtagaggaaaaatcagtgcagcaaaattctccaaggcactgagtccatgaaaacaaggccctgtgagattcattcccctccatcccacttcctctggaagctcagagaccagctccgtttcacattcaaaatatgtcacaatttcagttccttttatctgtgtttctgttttgatctccaagaacttaattcaccttgactttttgaaaaaaaaattctgaaagcacaagaccgttcttggaaggccaggaaggtctagaaagcttggcatttctgacatgacatttggagcctgttacaaataaactctgagttgtcagcttgggtctcaagagtaaactctcagtgatacttccctgttctggagggccgtgttaattcagcactctgaggcctctgggattttgaggaacaaatgtgttgcagaatcctctctgcacaacttcagagagcttattctgtcagcctttgcaataacaacagctaacacttaatatggcactttctctggtccaggccctgacctaagtgccattcatgtattatctcacttcatccttacaaccctatgaagtaagaactattattagcattacccctttcttttatttatttatttaaattaatctttttttttaatttttcttttttattgagacagtgtcttgctctattgcccaggctgctcttgaattcctgggctcaagcgatcttcctgcctcagcctcccaaagtgctaggattacagacatgagccactttgcctggccgcattacccccttttactgataaggagctgacgccgagggagataaagtcattttcccatggtcatagaggtagtccgtgaacaaatcaggatttaaatcctgaggttgctgctctgttactgcttccctgcagctgagagcaacacctgtcatgcttctcaccattttttatcattaaatcatttctcagccttgtttttatatatttactagtgccctgcaaaaattttgcctccttaatgcttgttctaggtcccaattctgaggtttaataataatagttaacatcactgagcgctcaccctgtatgagacaactcacatttattatgccatttatagatggcataactgaggctcagagaagataggtcacttctgcaaaatctcacagccagtaagtggcagatgtggcctgctaccttacaccaactgtctcctgtgaacacttctatttattttaatttatttgtcaaattgacaaataataattgcatattcatggggtatatattgatgtttctatacatgtaatgtatattgatcagatcagggtaattagcatatccatcatctcaaatatttatcatttccttttgttgggatcgttcaatatcctcctttgaactagttgaaactatttaatacattattgttaattagagccatcttacagtggtatagaacattagaacttattcctctcatctagtggtaattttgtatcctttaccaaatctctccctttcccccactcttccaggcctctggtttcctctgttctactttttacttctatgagatcaactttttttactattccacatatgagtgagaacatatggtgtttgactttctgtttctggtttaggaaatacaatggacttaacataatgtcctccatttccacccttgttgccacagatgacaagatttcattccattttatggctgaatagtattccattatgtatatataccacattttctttatccattcatctgttgttgaacacttaggttgattccataacttggctattgtgaatagtgctgcagtaaacatgtcagtgcagacatctcttaggcaaactggtttcaaagcttttgggcaagtacccacaagtgagactgatggatcatatggtaattctacttttagtttcttgaggaacctccatatagttctccatggtggctatactactttacagtcccaccaacaacacatgagttccctttactccacatccttgccaacatttgttttttcatctttttgataatagccatcctaactggggtgagatgatacctcatcgtggttttgagttgcaaaatcatcactgatgattagtgatgttgaacattttttcatatacctgttgaccatttgaatgtcttctttgtgaaatgtctgtttaaatcatttacccattttaaaattgaatattttgctgttgagatgtttgagtaccttgtatattctgaatattagtcacctgtcagattagtagcttgcaaatattttctcaaattctgtaggttatcttttcactctgttgattgcttcctttgctgtgcagaaactttctagtttgataatcccatttgtttatttttgcttttgttgcctgtgcttttgaggttttattcacaaaatcatttcccagaccagtgttctgaaatgtgtgtcccatgtttccttctagtagtttttatcattttgggtcttatatttaagtctttgatccattttgagttaaattttgtagagtgagaggtttgggcctagtttcattcttctatagacatccagtttgcccagaaccatttattcaggagactgtcttttccccaatgagtattcttggcacctttgtcaaaaatcagtttgctgtagatatttggattaatttctggattctctattctgttccattggcctatgtgtctgcttttgttagtaacatgctattttggttactataactctgtagtgtattttgaggtttggtggtgtgatacttccagctttgttctttttgctcaggtttgctttagctatttgggttcttttgtggctccatacaaagtttagaacttttttctatttatgtgaagaatgtcatgggtattttgataggaattgcattgaatctgtaggttgctttgaatagtgttgtcattttgacaatattagttctcctccatgagcatgggttgtctttccatttgtttgtatcctcttccatttatttcatcagtgtcttgtagttttccttgtagaggtctttcacctccttggttacatttcttcctaaggttgttttttgtttgtttgtagctgttgtaatgggattgccctcttgatattttttttccagctagttcattgtttgtgtagaaaacactactgatgtttgtatattaattttgtttcctgcaactttattgaatgatttattagttctaagagtttttggtagagtctttctatatatgagattatcatctgtaaacaggaacaatttgacttctttctcttgaatatgaatgccatttatttatttctcttgcctaatgactctgactaggatttccagtgctatattgaataagagtggtgagagtaagcatcattgtctgtccctgttcttggaagaaaaacttccaactttttctaatttagtaagatgtttgctgtgagtttgtcacatgtggcctttgttatattgaagtactttccttctatacctaattgtaagaagtttctatcatgaagtgagcttaaattttatcaaaagatttttctgcatctattgaggatcatatggcttttgtctttcactctattgatgtgatgtatgatgtttatttatttgcatatgtcgaaccatccttgcatcctgagataaatcccacttgatcatggtgtattgtgtttttgatatgttgtttgatttggtttgctagtattttgtttggcatttttgcttctatacgtatcagggatattagcctgtagttttttttgttgttgttgttatgtccctattcagttttggtatcagggttatgctggcttcatagaatgaattaggaagaattaattccttctgcttcaattttttggaatagttttagatgaaccgatatgaattcttctttaaagattcagtaaaattcatcagtgaagccatctggtgtttctttttgggagactctttattactgattcaatcttattatatgtttttggcttatccaggttctgttttcttcatggttcaatcttggtaggttgtatgtgtctaggaatttacccatttcctgtaggtttcaaatatattggcatataattgttcatggtagtatggtagtctctaatgatcctttgtatttctgtgggatctgatgtgatgtttcctttttcatttctgattttatttatttggttcttctctctttttttcttagtttagctagtggtttgtccattttgtttaccttttcaaaaaaccagctgttcaccttttgtatttttttaagtatcaattttatatttctattctgctctttattacttcttctactaattttgggcttagtttgctcttgcttttctagttccttgaggggcatttttaggttgcttatttgaaatctttttaatttctaatgtaggcatttattgctataagcttgcctcttaacactgcttttgctgtgccccatagtttttggtatattgtgtttctattttagtttgtttcaaggaattttaaaattatattcttaatttctttctttacccattggttattcagaagcatgttgcttaatttccatgtatttgtatagttttgaatgttccccttgttattgctatctatttttgttcccttgtggtcaaataagttactcggtatgattttgattcttaaaaaaatttttttgagacttgttttgtgtcctaatatattgtaaatcatggagaatgtttcacacgctgatgaaaaataaatatgtattctgcagctgttgggtgaaatgttctgtaaatgtctgttaggtccatctggtgtatggggccatttaaatctgatgtttctttgttgatttcctgattagatgatctgtccagtgccaagaattggctgctgagtccccagatattgttgtattgggatctatctcttcctttagatttaatatttgctttatatatttgggtggtctagtgttgggtgcatatatacttacaactgttattttttggtgaattcatctttctattattatataatgtccttcttttctctttttacagcttaacccaaagtctgttttgtctgatataagcatagctattcctgctcacttttgatttccatttgcatggaatatcttttttcgtcccttcacatttagtctatgtatatctttacaggttaggtgattttcttataggcagcatatagttaggtcttgtgtttttaaaatctattaggccagtctatatcttttaaatggggaatttaatccatttacattcaaggttattatttcttgggaggtgaggacttacttctatcattgtattgattcttttctgcttgttttgtgtatcttttgttccttacttcttttcttattgtttatctttgcaattgaatggtttcctgtggtgataaggcttgattcctttctgattctcctttgtgtatcagctctactagtaagttttatagtttcgcatgttttcatgaaaatggttatcatcttttcacttccagatatgactcctttgagcatttcttttaaggctggtctagtggtgatacattctcttaatttttgcttgtctgggaaagattttatctcctcttcatttcggaaggatagctttgcttggtataatattcttcatggacaggttttttcttttggtatgttgaatttatcatcccaattctctcttgacctctaaggtttctgctgggaaatccacccttaggccaatgaagattcccttatatgtggcttgatgctcttctcttgctgcttttaaaattttttcttgtctttgacttttgacagtgtaagtgtaatgtgacttggggaggatctttttgcattgaatctatttggaaattttttagcttcttggacctggatgcccatctctctctcaagacttgggaagttctctgctatcattttattaaatatattttcctacacttttctcctctctttgccttctgaaacacccataatatgagcatttctttcctgaactgtgtccgataaatcctgtaagcttttttcgttctcttttatgccttttttgtttgtctgcctgtgttatttcaaaagacctgtcttcgtgcttagaaattctttcttcttggccagtctgttgttgaagctctctattatatttttatttcattcaatgaattcttcatctctaggatttctttttggttcttttttatgataactatctttttttgttgaatttctcattcaaattatgaatcattttcctgatttcattgaattgtctatctgtattctcttatatctcactgagtcaccttcagattattattttgagttcctttatttgcatttcatgtatttccctatgatttgggtctgttactagaattattattttccttatggggtgtcatgtttccatgcttttaaatatttgatgtgttcctatgttgatttctacacatctggtggaaaagttgtctctttcaattttatggagtaggtttcacagggcaaagcttattcatataaatgtgtcctggagtatcagttcagtgaggtgagcagaccttggttctacgtagacattttagtgtagtcttcatgtggtttctttggctgtaatccacattagtggcatttgcaagtctctcagtggcctaggctgtaagaatttgtagtgatagccagatgtgggcttcctgggctgtttctcaggtaaagggaatgtgtgtacacatgatgggtcaacgaactatgggttaagtttgctagggttaaggccatggggctgttaccctggctgggagtatgtcaatgcggttgctcagtcagcctggggggtggagggcatgcctgccaggagtggcttgcagggatatttctcagtctcaggatgcaggtacatagctgcttggatggcctgagggaacatctgctggggcaacccattaggctgtttctctggctcagaacgtctgcttggcttgcctggggacatgccttccaggggtgccccacagggctgtttttcaggactgttatatgggtgcacaattgcaaagctagcctaagactggtttgctgggcatgacctatggggatgtttctcagggccaagactcaactgcacagctgctcacttggcctgggagcatgtttcctgtgaacatttctatgatttataaaaagcatcctatttgcccttgcacagtatgtgctagctcttggagctaacattcaagacaatctctaaagttattagataaacatacagtactattgtgggaagagctgcagattgcagggtggggtattaaagtaggagcctcttagtgtggagaattaaaaaccgcaacagagtggttagatgaaagtgaggagaagaggaagcctaatgtggctgcaaatttgcctagaccatcaaatcctatggttccatgtctaatacttgtgctttaagagcacattgcagtaacacttgtttgcctagtgatgatgtttaccaagttccctcaaatatgtgcttgtcagaatagggtatgcaaaatcagtagaagactgtccattccccatgaaaatctgattatctggagaggcagacatgatgtgtctgcctgacatatatcccccaaagagcaaggagaactaattttaggctgcagtagtttttatacaagtgccatagggataaaaaaaaaaaagagagacccacgggaaatgtcagttgctaaggtgatctgcagaaggcaatgtagatgttgaagaaggttatttggattggcaagagttaggcacattgcaggttgaggaagaggggggaataggaagaggggcaggttagagatcagagagagtggcgtgaaaggcacaggaataggcataaagaagtgcaaacccaggtcttggctacctggtcttgaagaacagtaaaataataacaataataccagtttcatagtttcaaagtgtctttacatgcattactatatttgcttctcttggagccctcatcagatatggggttggggggcatcattatcctcattttattttatttttatttacttatttttttattatactttaagttctgggatacatgtgcagaatgtacaggtttgatacataggtatatatgtgccatggtggtttgctgcacccatcaacctgtcatctacattaggaatttctcctaatgctatccctccccttgtcccccaacccccgacaggctctgatgtgtgatgttcccactcccctgtgtccatgtgttcccattgttcaactcccacttctgagtgagaacatgcggtgtttggttttctgttcctgtattagtttgctgagaatgatagtttccagcttcatctatctccctgcaaaggacatgaactcattcttttttatggctgcgtagtattccatagtgtacatgtgtcacattttctttatccagtctatcattgatgggcatttgggtttgttccaagtctttcctattgtgaaaaatgctgcaataaacatgtgtgtgaatgtgtctttatagtagaataatttataatcccttgggtatataccccgtaatgggattactgggtcaaattgtatttctggttctatatacttgaggaatcgccacactgtcttccacaatggttaaactaattttcactcccaccaacagtgtaagagcattcctatttctccacatcctctccagcatctgttgtttcctgacttttttttttttaatttaagttcagggatacatgtgcagaacgtgcagattttttacaaaggcatacacatgccatgattgtttgctgcactcatcaacccatcctctacattaggtatttctcctaatgctatccctcccctagcctcccaccccctgaaaggccccagtgtgtgatgttcccctccctgtgtccatgtgttctcattgttcaactcccacttatgagtgagaacataatggtgtttgattttctgttcctgtgttagtctgctgagaatgatggtttccagcttcatccatgtccctgcaaaggacatgaactcattattttttatggctgcatagtattccatggtgtatatgtaccacgttttctttatccagtctatcattgatgggcttttgggttggttccaagtctttgctattgtgaataagctgcaataaacatacatgtgtatgtgtctttatagtacaatgatttataatcctttgggtatatacccagtaatgggattgctggattgaatggtatttctggttctagatccttgaggagttgccacagtgtcttccacaatggttgaactaatttacactcccaccaacagtgtaaaagcattcctatttctccatatcctctccagcatctgttgcttcctgacttttcaatgatcgccattctaactggcgtgagatagtatctcattgtggttttgatttgcatttctctaatgaccagtgatgatgagcttttcttcatatgtttgttggccgcataaatatcttcttttgagaagtgtctgttcatatgctttgcccactttttgatggggttttttgttttttcttgtaaacttgtttaagttccttgtagattctggatattagccctttgtcagatggataaattgcaaaaattttctcccattctgtaggttgcctgttcactctgaagatagtttcttttgctgtgcagaagctctttagtttaattagatcccatttgtcaattttggcttttgttgccattgcttttggtgttttagtcatgaagtctttgtccatgcctatgtcctgaatgatatagcctaggttttcctttagggtttttatggttttaggtcttatgtttaagtttttaatctatcttgagttaatttttgtataaggtgtaagggaggggctcagtttcagttttctgcatatggctaaccagttttctcaacactatttattaaataggaaatcccttccccattgcttgtttttgtcagttttgtcaaagatcagatgggagcagatgtgtggtgttatttctgaggcctatgttctgttccattggtctatacatctgtcttggtacccataccatgctgttttggttactgtagccttgtagtatagtttgaagtcagatagtgttatgcctccagctttgttctttttgcttaggattctcttggctacataggctcttttatggctccatctgaaatttaaagtagttttttctaattatttgaaaaaagtcagtggtagcttgatggggatagcattgaatctataaattactttgcgcagtatggccattctcatgatattgattcttcctatccatgagcatggaatgttcttccatttgtttgtgtcctctcttatttccttgagcagtggtttgtagttctccttgaggaggtctttcacatctcttgtaagttgtattcctaggtatcttattctctttgtagcaattgtgaataggagttcactcatgatttggctctctgtttgtctattatttgggtgtaggaatgcttgtgatttttgcacattgatttgtttcctgagactttgctgaaggtgcttatcagcttaaagagtttttggctgagattatagggttttgtaaatatacaatcatgtcatctgcgaacagaaacaattggacttcctctcttcctatttgaatacactttgtttctttctcttgcctgattgccctggccagaatttccaatactatgttgaataggagtggtgagagagggcatccttgtcttgtgtgtattttcaaagggaatgcttccagcttttgcccattcagtatggtattggctgtgggtttgtcataaatagctcttattattttgacatatgttccttcaacatctagtttattgagtgcttttagcatgaaagggtgttgaattttatcaaaggccttttctgcatctattgagatattcatgtggtttttgtcattggttctgtttatgtgatgaattatgtttattgatttgcgtatgttgaaccagccttgcattccaggaatgaagccaacttgatcgtggtggataagctttttaatgtgctgctgaagttggtttgccagtgttttattgaggattttcacaccaatgttcaccagggatattggcctgaaattttcttttttttgttgtgtctctgccaggttttagcatcaggatgatgctggactcataaaatgagttagggagagtccttctttttctattttttggaacagtttcagaaggtatggtaccagctcctctttgtacctctggtagaatttggcttagaatccatctggtcctggattttttttttttggttcgtaggctattaattatactgactcaatttcagaacttgttattggtctattcagggattccacttcttcctggtttagtcttgggagggtgtatgtgtccaggaatttatccatttcttctagattttctagtttatttgcatagaggtgttttagcattctctgacggtagtttgtatttctatgggatcagtggtgatatcctctttatcattttttattgtgtctatttgattcttctgtcttttcttctttatttgtctggctagcagtctatctattttgttaatcttttcaaaaacgcagcttttgaattcattttttaaagggttttttgtgtctctatctctttcagttctgctctgatcttagttatttcttgtcttctgctggcttttgaatttgtttgctcttgcttctctagttcttataattgtgatgttaggatttctatattagacctgtcctgctttctcctgtgggcatttagtgctataaatttccttctaaacagtgctttaactgtgtcccagaggttctgatacattgtgtctttgttctcattggtttcaaagaatttatttatttctgccttaatttcattatttacccagtagtcattcaggagcaggttgttcagtttccatgtagttgtgtggttttgagtgagtttcttttcttttcttttctttttttttttttttttttgagacagaatcttgctctgtcattcaggttggactgcagtggcacaatttcagctcactgcaacctccgcctcctgggttcatgtcattctcctgcctcagcctcctaagtagttgggactacagacgcctgccaccacgcccggctaattttattatttttagtagaggcggggtttcactgtgttagccaggatggtcttgatctcctgaccttgtgatctgcctgccttggcctcccaaagtactgggattacaggcatgagccactgcacctggcctggagtgagtttctcaatcctgagttctagtagattgcaatgtggtctgagacacagtttgttatgatttctgttcttttgcatttgctgaggagtgttttacttccaattatgtggtcaattttagaataagtgcaatgtggtgctgagaagaatgtctattctgttgatttggggtggagagttctgtagatgtctattaggtccacttggtccagagctgagttcaagtcctgaatatccttgttaattttctgtctcatttatctttctaatattgacagtggggtgttaaagtctcccactattattgtgtgggagtctaagtctctttgtaggcctctaagaacttgctttatgaatccgggtgctcctgtattgggtgcatatatatttagcatagttagctattcttgttgcattgatcgctttatcattatgtgattcccttctttgccttttttgatctttgttggtttaaagtctgtcttatcagagactaggattgtaaccccggctttttttttttttttttttttttttgctttccatttgcttggtaaatattccttcatccctttagtttgagcctatgtgtgtctttgcatatgggactggtttcctgaatacagcaccccaatgggtcttgactctttatccaatttgccagtctttgtcttttaattggggcatttagcccatttacatttaaggttaatattgttatgtgtgaatttgatcctgttattatgatgccagctggttattttgcacattagttgatgcagtttctttatagtgtcgacggtctttacattttggtatgtttttgcactagctggtaccggtttttcttttccatatttagtgcttcctttggagctcttgtaaggcaggcctggtggtgacaaaatccctcaccatttgcttgtctgtaaacgattttatttctccttcacctgtgaagcttattttagcaggacgtgaaattccgggttgaaaattcttttctttaagaatgttgaatattggcccccactcttttctggcttgtagagtttctgcggagagatctgcggttagtctgatgggcttccctttgtgggtaacccaacctttctgtctgactgtccttaacattttttccttcacttcagccctggtgaatctgatgattatgtgtcttggggttgctcttattgaggagtatcttagtggtgttctctgtatttcctgaatttgaatgttggcctgtcttgctagggtagggaagttctcttggataatatctggaagtgtgtttcccaacttagatccattctccccgtcactttcaggtacaccaatcagatgtaggtttggtcttttcatatagtcacatattttgaggctttgtttgttccttttcattattttttctttaatcttgtcttcatgctttatttcattaagtagatcttcaatctctgatatcctttcttccatttgatcgattctgctattgatacttgtatatgcttcataaagttctcgtgctgtgttcttcagctccatcaggtcttttatgttctgctctaaactggttattctagttagcagtttctttaacctgttatcaatgttcttagatttcttgcattgggctagaacatgatcctttagctaggaggagtttgttgttacccaccttctgaagcctacttctgtcaattcgtcaaacccattcaccattcagttttgttcccttgctggtgaggagctgtgatcctttggaggtgaagagtcattctggtttttggaatttggggcatttttgcactggtttttcctcatcttcatggatttatgtacctttggtctttgatgctggtgacctttggatgggatttttgcacgggcatcctttttgttaatgttgatgttattactttctgtttgttagttttccttctaacagtcaggcctgtcttctgcaggtgtgctggagtttgctggaggtctattccataccccgtttgcctgggtatcaccagcagaggctgcagaacagcaaagattgctgcctgctccttcctctggaagctttgtcccagagggacacctgccagatgccagccagagctctcctgtatgaggtgtctgttgacccctgctgggagtgtctcccagtcagggggcatggggtttaaggacccatggggttcagggatccacttgaggaggcagtctgtcccttagcagaggtcaagtgctgtgctgaaagatccgctgctctcttcagagctggcaggcaggaacgtttaagtctgctgaagttgtgcccacagccaccccttcccccaggtgctctgtcccagagagatgggagctttatctataagcccctaacaggggcttctgcctttctttcagagatgccctgcccagagatgaggaatctagacaggcagtctggctatagcaactttgctgtgctatggtgggctctgccagttcgaacttcctgtcagctttgtttacactgtgaggggaaaactgcctacccaagcctcagtaatggtggacacccctcccccatcaagctcacacatctcaggttgacttcagactgctgctgtgctggcagcaagaatttcaagccagtggatcttagcttgctgggctttgtgggggtgcatctgcaagtgacctgcaagatcacttggctccctggcttcagccccctttccagaaaagtgaatggttctgtcttgctggcattccaggctccaccgaggcatagcaaaaaactcctgcagctagctcagtgtctgcccaaacagcagccaagttttgtggttgaaacccagggccctggtggtataggcacccgagggattctcctagtccgcaggttgcaaaaaccatggaaaaagcatagtatctgggccaaatagcatcatcccccatggcacagtccctcaaggcttcccttggctaggggagggagttcctcaaccccttgcacttcccaggtgaggcgataccccactctgcttctgctcaccccccatgggctgtgcccactgtctaaccagtcccaatgagatgagctgggtacctcagttggaaatgcagaaatcacccactttctgcattggtcttactgggagctgcaaaccggagctgttcctgttcagccatcttgccagtcaccctatcctcattttatagataagcttccctcaaagaagctaagtaatttgtctatccaaggtcacctacttagaaaaggcagaccagaacccaggtctctgtgctctttctgccatctgttccctgattgtacagctccactagttggtgctgactctcatatatgagaatacagatacgattgggaccaagtggtggaaagtcatatttgtggttgaggaatttccatttggtctgataggcaattacactctctgagtgaaatgaaaattgcattttaattggttacatctagcaatgatgtatagattttactggttaaatctctaaaaacagatgatgctatggtttctaggcatcagctaacaaagtctgaggttaggaaagtgatattgtacatatagagtagggacaaagtataagaaatatgatataaaaacaatggagataactcagccaattgattgaatgtgaagtatagaagagaaaagaattaaagaaaacttcccaatagtggttaccaactgagtgagatcagtttgaggagatggataaattcagacagagtttgaggtagaggcagaatctccaaataagactatcctgtaggcaactaaaaatgttggaactatagctcaggttagaatttaggaaaagccatttgagctctcctagtcccagatttgtttctttatttgtaaaatagagataacaatgccaatttagcctgtctcaaggatagctagtggagcaaatgagatatctgaaaagaaaattctttgcaaactataagacgaaaatatgggctgtcaaaaggcatatctgggaggcagaggcaaagaaacagtgcaaagtttccatggtgggtaaagcctttgaggaaatataggcagaggtgagccgaggacaaagatggggctccagtgggtgtccacaatagggtaaaggtgaagtgactgggggtcagaagggtgagcagtcaggaaatggaaaaccatgaggcctcagggctacagaagtcagatgagtggaggtttcaaagacatgagaattgaagtctacagagtgactgaaaaggaagtttgagaagagaacagtagaacaggctgctgagcaggaatgaatgatcttaatcttagtcatgtaaaattctaaggagggtctcctctgaggtggagggcatggggcagggaaggcatattgctgtagattaggaagaagataatgaccaaaaaacgacaccagagtcctctggttcagggtgtctaggtgcaaaagaacaagaagaaatggtacagaatttcagttggtcacagagtttggtaggaggaatcactagcatttgatgctcagagagcaaaggttacacagctacagagtgggaaggttgagagtcaagcccgttctcctggatttctggtagactgtacattctaccatactatggctcaagtgtatgatgttcagagaggaggagagatgaaccgaggaagaaactaaagttacatgagaaagatgcactgagagtaagagtcaaggtgacccagagagaagtacacatcctctctccctgactcaaattctttctccagcaacaaaccttttgcagtagctgcagaactcaaaagcatcctctctccttcctgaggtcactgtctcaactgctgcttttctttttttattattagcttcctgccttcagctttctacaccacccctctactgataactttcctgttactgaatcgcctggtactattttttttttttttttttgggacagagtctcacttcatcacccaggctggagtgcagtggcgcaatcttggctcactgctgcaacctccgccttcagggttcaagctcttctcgtgcctcagcctcctgagtatctgggattacaggcaagcaccaccacatttctccataccaaggaattggggtttcatcctgagggcagtgagagcctctgaaatgtggagaggagatctgcattttagagaggtgacactggcagtagatgaggacagtttggtggaggcaagcccaagtacagagaggctaatttttgtatttttagtagagatgaggtttcaccatgttggcaaggctggtctcaaactcctggcctcaagtgatctgcccacctcagcctcccaaagtgctggaattacaggcatgaccaccggactgggtccacctgttactttttattcccattgaacactcacttctccttaaagcaatctttttctccttaaagcaagtcttggcattgtgttctttactctccttgtatcatttggccagtctttctcaatcatcattccagcctcttctctctgcctgtcccttaattgttggtgttccccagggttctatcctcctttgttctcacacccccgctgtgcgagcctctccactcctctggcttcagttactatcacgtgctgacagccttacatttatcaggttcacctagttcctcctccccagctatacagagcaacaggacagctccatttgcctatttcttgaatgcctcaaatccaaaatgccccaaattaaactccccatttcttcagcccaatcagcatcttcttcataggttccttttattaatgaaaggcaccacttccttcccctaatacctgagaggaaccttgacttcccttttccctgaccctctatatttagtccatccacagtctggtcagttctcactcctttatagctctcagtcccatccaggtctgtgcagcctctctgttctgcacaatcacaagagcacccctactcacctctctgtacttgggcttgcctccaccaaactgtcctcatctgctgccagtgtcacctctctaaaatgcagatctgctctccacatttcagaggctctcactgccctcaggatgaaatcccaattccttggtatggagaaaggcccctctggaagcactctctgcccacccatcctccttgcatgcttcacctaggctctactatattacttacacttccccaaacttgccatgtgctctcaacttggggcctttgtaaatcgttttccactgcccagagtccctgtccctctctccttagtcaatctctctcccccagaaccttaaaaaaactcccctcattccccaaggctggtgtggcccctcccctgcattctcatagcactcttgaggtttctttctgtgggcccttcttcctcatagagctttgtcctgttgacttgcttgacccattcatcaccccagaggttctttttggtctaagattatgttttcttcactgtcatatacacagggctgagtatatgtggcacagagaagcagggcagtgttttgattgagcagacaactgggttcaagccacatcctaccactaacttgcaagggaatttgggcacacaagctattccatgcctgtgcactttggtcttcttatctataaaatgatcaaatcagagtacctagagctgttatcaagtaagagtagcaaggattgtttgaggactaattgagttaatagcataaggagcatagcagagtgcccggcacagagtaactgcagtacaactcactgttgctgccccttgttggatgaaggagcatctgtggcttgaggttgggggagctgataaaggaaatgcctttccccggagcccttgggcaggtttggccaagacagatggcttgaagtgaggagccatgagagtagcaatcagaaagtcaagaaccccgatgccaatttaccagaagggtttccaatgtgggagttacaggtggcagagacagtgggcaaatagtatactcagaaggtcactgagtagcaactagggaggcttccgcatggcaggtctaccagttttccccctctgtctcaggactgctctacacagaagcctaccattatttccttgtaaagatgatgcaaagtgcaccaacctctgttctccaggttatttgcactgtagcaatttgccacaaggtcagggcagctcattgtctaattgcacactgcttgcggctattctggatttgtttgagtcaatgtgtcttcagactctgcgggcaggacacagattcaaatctgggaaccaaaggtgggcaaacccatctgaccatagtcagtgttgacggagaggggttagtgggggaggagtctgtgccaatgtctaatgatcccgtgagaatctatcaaaagatgtatttttctaagtataaataaaaatagcatctgtgaaatcaggaacagttgcagctttgctatcactgtgacaacattctaagcatcgacgtaagctattcaccctcatcagactttaactggtcacgcagcatgtttcgttttcttcctaactcaaatatggaatctccatctgctgctgctgctccctgtcccttctttgttgtttaattaccagcaaagctgcaggagatgaagtcttcattctgtatttgttctgaatcccctttcagtacagtaagctgtgcacatgctcactcctctcccattaaggccgtggaaattatgctgccaaataatttcccagtttcccttgaatttgcgtcttcatatatttctcagcttcctgtcgcatacttcattggtctggctaatttttatagtcacatctagcagacgattttcttttctttctttcttttcttttcttttcttttttttttttttttttttgcagtctagtgaaatgttgcagtgtggtgtagtcaaatgtattttatattggcaggaatgcacaatcaaaatattttaaaggtttctcaagagaaagtgtcgaactaaatggaattttgaatgtgggctggccctgctttttgctggtagcctttagctatatgaggtttctaggaaggatgtttgtatatatatttttttcctttagctttctggggaataagatgctctcagtatcaatgcctctggcttctgtgattatactctccctacaactgtggctgcttgacaaccatctatcactcccatttcccattcccatgtagccccctgtggggcctaaaaccaaccccaacctaaaaccaaccccaacctcaagcagaggaactgaaacaattctagaactcagtgttgcccttggcgttgctctgatcttgatcttgtgcctcaattctaacattaaacttctcttttgttcctgagatgttgttcccagttcattaggggaaacggacccttgtcttggcgttcttggtctgagtctctgcgctcaaggctttgtctaattcagaattcgggactcacagcccacctgcactagtcatacctcctcctaagtctaaagttttctccttgcactgtggcctggtagtaagtgccttgcttcttacagatggacttccccaatgaggtctgccttcctccccagttgcttaagaggtccttattgctggggtctgtttttggtctacctgctcccctcaaatccatggtggaccacctattactattgtttttggtgatctcttgtctgtggtcatgcctgccggatttcatgccctacctttgacaaggaacttaccccagcatctgtaactgacagtgtccctgagggcctgctacatcccagcaagggaggagtccagggcttggtcctgcctctctcgagctgccctctccctgcaattcacagccctgttgatcttgagatggaacaagcggtggtcttcatggtcaaaaagttaaggacttgattgctttcaaatctatttctactttttcggccccttctctaacttcttaaactgtaagctttccctaagattctaacagaatcttggctttaaagttaggttctttaagactaaagtaggttctatatggccatgtgaaaagggcaagactgtccttttcaataaaaggccatttgtaatgaaacctttatgtaaaaattcctctgactgattccatatcagccttagttctcatgccttgtctccttgtgccctaggctctgtgtgttaacgctggttctagtgccctgcccatccagagctgacacataattgtgacattaatccctctccacatttgctttattgacctggcttgtgcaagctgcctgtaccacctctagtattccattggagtaccttctgattgtgcatttagtcctgctgtcctggccctgccaactgatagaaagtataattcactgtaagattgagttaagacactctctccaagcttctaattttgttgtattcgctttcctgagtcaggctcacagagttccagcctctatatgactatttccctgaattatatctgccaccctgacctgtctccttagttctaaagtatgtgctccccattccagctaatggcctcacaattcaccttacaatctaagctaggaacctcagatttgctgttgagatccatcaaaacgagagagccattatccatgtaatcagaactaaggccccagcagtcaactcagaaataggtttggatgcttagctctgcacatgagaaatttcatcatatcagttcttaagaaatcaacttacacccatagaactcatagggaactacacccacagaactaatagggaactaattttttttaccttttattgtagattcaggggtacatgtgcaggtttgttatataggtaaattcgtgtcacagggatttcttgtatagagtattttgtcagtcaagtactaagcttagtacccaataactattttttctgattctctcccttctcccaccatccaccctcaagtagatgccagtgtctgttgttcttctctttgtgtccatctgttctcataatttagctcccacttataagtgagaacttgtggtatttggttttctcttcctatgtaagtttgctaaggataatggcccccagctccatccgtgttcctgcaaaggacacgatctcattcttttttatggttacatagtattccatggtgtatatgtaccatattttctttatccagtctaccattgatgggcatttaggttgattccatgtctttgctattgtgaatagtgctgcaatgaacatatgggtgcatgtgtctttatgataaaatgatttatattcctttgggtatatacccagtagtggaattgctgggtcaaatggtagttctgtttttagctctctgaagaatcctcagacagctttccacaatgtctgaacaaatttacactctcacaaacagtgtataagcattttcttttctctgcaaccttgccagcatctgtttttctttgactttttaataatagccattctgactggtgtgaaatgttatctcatttgtgtttttgatttgcatttatctaatgatcagtgatattgagcttttttttcatatgtttattggccacatgaataatatgtcttcttttgaaaagtttctgttcgtgtcctttgtctactttttaacggagtttttttttcttataggttggtttaagttctttatagatgctggatattagacctttgtcagatgcatagcttgcaaaaattttctcctattctgtaggttgtctgtttactctgttgatagtttcttttgctgtgcagaagcttttaagtttaattacatcctatttatcaatttttgcttttgttgcaattgcttttggcattttcatcatgaaatctttgccagacagggaactaatttttaacccagaattctgttttgtaaatttagaggattataatggggtattcaactttccttttattgcattcttccagttcataatccatagtcactttttaaaaaaattattttacagacagtctcactctgtcatccagactgaagtatagtggcatgagcatacctcattgccacctcaaactcctgggctcaagcaatcctcttgcctcagcctcctgagtagccaggactataggtgcacaccaccatacctggctaatttttttaaattactttttgtagagatcggggggggtctcactatgttggccaggctgatcttgaactctgagcctcaagtgatcctcccaccttggcctcccaaaatgctgggatgacaggtccatagtccctcttccagagaaacttcactgactggatgagttatcaggggttccatggaagaaataggctttgagtaaaggagtggggtaatcttgagagattctcattatgaacatgtcagagtaatcagagtaatccatgtttctatagagagatggcatcaactctcacattcccataaggtataaaaagtaaactcctcttgatgtctttctagcaagcatcaagaggagtttactttttataccttatgtgaatgtgagagtttatgtcatcagctcatccttggtagctaatgggatgacaggtgttgaagttagatcatccctacattcattcacaaagctggaacaatgagggagcacttagtgccaagtaccctgtgaagcacacacagtgtctcaacctctcatataatacaacaactctatgaaatagatgttacgtatccttgttgtggttgagttatgtacccccaaacaatatgtccaagtcctaaccccaggtacctgtgaaagtggccttatttggaaataagttctttgcagatgtaatgttaagaagaagtcatactggatatggtggaccctaagcccaatatgactagtgtccttataagaaaaggagaagacacagaaacacagagaaaagacaatgtgaagagacagaaggaaaatgccaataatgacagagtcaagagattggagtcacattctgtaaggcaagaagtgccaaggattgctggtaaatacctgaagctagaagagacaaggagggattcttccccagagccttcgaaggaagcacagccctgctgtattagtccattctcacactgctataaagaaatacctgagactgggtaatttataaataaaagaggtttaattggctcatggttccataggctgtacaggaagcatggcggcatctgcttctggggaggcctcggggagcttttactcatggtggaaggtgaagcaggagcagttgtcttacatggcaggagcaggaggaagagagaagggggaggtgctatacacttttaaacactcacgagaactcactcacgagaactcactcactatcatgagaacagcaccgaggggacggtgctaaaccaatcacgtgaaattgttcccatgattcaatcacctcccaccaggccccacctccaacactggagattacaattgaacataagatttgggtgaacacagatccaaaccatatcccctgctgacaccttgattacagacttctggcctccagaactgtcagagaataaatttctgttgttttaagctaccctgtttgtgatactttgttaagatagccctaggaaactagtacaacctccattttccaaatgaagtaaggtatgcttggaaatgctgatgtacccagttgcaatttcttagagctccctgactgcaaactcttgaactcatgttcctttactcccttgctggttgatctagcctattaggtgatagttccctttctcttctgttaacattatattctagataaatgacatcttctagataaattacataacaacatcatcattcccccaagtctgattatgcagaacattagttctgtgagatgttagactgtgttagcatgcaaaaaaagttttcaaggttaaaaaaagagagggaaattctgtgtatatcaggctttttgtttgtttgttttctgtaggacctcatagaaacttcaaaatgtactgtgactctccaagaggggcgtattagagcttgccatgtttctcaggttaatttgaccaagaaaacttttcttttacagaacatctcatggattcgtgtttagtggaagatactgtgggaagtgctaacttgaaggattaataactcttttcttttttttgacatcatttacatgccaaccatgttttttgagtattatcttcacatagatttctaaagaagaattgaaaaatattcttgctgcatcagaaatatgttgacaaaccaccttttggggtaggttaaattaactactgctttaccatacctcttttattctttagatcattatatggattctcagggtcaaagtcttctagtcaaaggccattagagacatggctgtagttaacagaattggattcatggacttcttgcacaccattggaaattgcagtgtctcaggaaagggtgttagtcaggaattacatatattataagatttgtgctcatgttaggtaatttgaggataagattccaggaagcaggactttgcagaagcaaaagtggtttttagttcttctaatagactctgaaaacagggacccagattatcatacccaagcaatgaaaatatgtcccgcaaaatctgtgtgttcttttctagatgtccaatgggctttcctcccacagtcatgggctgctccgtagtatttatacaggtgcagcaagaagtggttagcacaaatttctctttggctagctaagaagagatttaaggctatgttattatccgtgacaactttgccttacaaatttaagtgtaaacctaggcttccagaacagaagtagtataatttatgacttttttcaggctcagagacaagttttagatgatactttccagctgtaatagtcattgcttgcatagtcaagtcaacttgactggattaaggaatacctggagaacttgtaaagcatgacttctgcgtatgtctgtgagggtgtttccagaggagattattgtgtaaatcagtggactgtgtggggaacttctgctctcaatggatgggcactgtctaattggcttggggccagaatagagcaaaaaataagaaaaagggatttgctctcttgctcctggagctgggacattcttctccttctgccctttgacattagaactccaggctctctggccttaggactctagggctttcaccagtgggcccccgggttctcaggccttcaaactcagcctgagaattacacctggttctgaggccatcaaacagggactgagccacactgttagcattccagggtctctatcttgccgacggcctgttgtgggacttctcagcctccataactgtgtgagccaattcccctaataaatctcctctcatctatctatctatctatctattatcatctatctacttattatgtagatgattgatagatgataattggtagattatcatctatcaatcatctatgtattatctatcgattatcatctatcaattatccatcatctatcaaatatttatcatctatcaattatctataatctatcatctatcaatcatctattatctatcaattatctatcatctatcaattatctatcatctatctatcatctataattctataatatcctattggttctgtctgtctggagaaccctaactaaaacacatagtatgcaacacaagaatgcagccctccatctgaagagttctctcaagtagcctgtgcttgacttttttggagatttctttgcattctttttagggaaacatgatccactggaggggtggtagttttaaacaactgaaattctctaacaattttcctgaatatacagtaaagttagtgtgtggcaggtggccgtaagccttatgtccacataagaaggactgtcctgatgaagcagaaactgtattaatattggcaatttaaaaattgttaattacaacaggaatttgcctttttctttatttggtcgtggttgtgggggtgtgtcactagaggtgggaaaatcccttcagtgaagtcaaacaagtcctgctaagcaggctggagtgtctctgaagtaactgttcttacccaggataggcccaatctttgttctcactcctcaaggatcagagtttgctgataggcttgtgaggacctcagcagatgtatttttctggagtgcaatggtgcaatcatggctaacagtagcctcaacttcctgggttcaagcaatcctcctgcctcagcttcccaagtatctgagatttcgtcttttttataggggttcttgtagtgtcaagatacctcttcttctttttttttaattatacttttaagttatgggctacatgtgcaggtttgttacataggtatgcaaaggccatggtggtttgctgcacccatcaacctgtcatctacattaggtatttctcctaaggctatccgtcctctagccacccactggccaataggccctgatgtgtgatgttcccctccctgtgtccgtgtgttctcattattcaactcccacttatgagtgagaagatgtggtgtttgcttttctgttcctgtgttagtttgctgagaatgatggtttccagcttcatccacatccctgcaaatgtcgtgaactcatcctttcttatggctgcatagtattccatggcgtatatgtgccacattttctttatctagtctatcattgatggacatttgggttggttccaagtctttgctattttgagtagtgcttcaataaacatacttgtgaatgtgtctttatagtacaatgacttataatcctttgggtgtatacccagtaatgggatggctgggtcaaaaggtatttctggttctaaatccttgaggaatcgccgcactgccttccacaatggctaaactaatttacactcccaccaacagtgtaaaagcattcctatttctccacatcctctccagcatctgttgcttcctgactttttaatgatcaccattctaactggcatgagatggtacctcaatgtggttttgatttgcatgtttctaatgaccagtgatgatgagcttttcttcatatgtttgttggccgcataaatgtcttcttttgagaagtgtctgttcatatcctttgcccacttttgatggggttgtttgtttattctcgtaaatttgtttaagttccttgtagattctggatattagccctttgtcagatggataaattgcaaaaattttctcccattctgtaggttgcctgttcactctgatgatagttgcttttgctgtgcagaagctctttagtttaattagatcccatttgtcattttggctttcgttgctcttgctttggtgtttcagtcatgaagtctttgtccatgcctgtgtcctgaatgtattgcctaggttttcttctagggtttttatgattttagattttacatttaagtctttaatccatcttgagttaatttttgtttaatgtgtaaggaaggagtccaggttcagttttctgtatatggctagccagtttttccaacaccatttattaagtagggaattctttccccattgcttgtttttgtcaagttgtcaaagatcagatggttgtagatgtgtggtgttatttctgaggcctctgttctgttccattggtctatatatctgtttttgtgccagtaccactctgttttggttactgtagctttgtagtatagtttgaagttaggtagcatgatgcctccagctttgttctttttgcttaggattgtcttggctatatgggctcttttttggttccatatgaaatttaaagtagttttttttctaattctgcaaagaaactcaatagtagcttgatgggcatagcactgaatgtgtaaattactttgggcagtatggccattttcatgatactgattcttcctatccatgagcatggaatgtttttccatttgtttgtgtcctctcttatttccttgagcagtggtttgtagttctccttgaggaggtccttcacatcccttataagttttattcctaggtattttattctctttgtagcaattgtgactgggagttcactcatgatttagctctctgcttgtttattattggtgtataggaatgcttgtaatttttgcacattgattttgtatcctgagactttgctgaatttgctttgctgaaggagtttttgggctgagatgatggggttttgtaaatatacagtcatgtcatctgcaaacacagacaatttgacttcctctcttcctatttggataccctttatttctttctcttgcctgattgtcctggccagaacgtccaatactatgttgaataggagtggtgagagagggcatccttgtcttatgtgtattttcaaagggagtgctcccagcttttgcccattcagtatgatattggctgtgggtttgtcataaatagctcttattattttgagattatgtttcatcaatatctagtttattgagagtttttagcataaaggggtgttgaattatatcaaaggccttttctgcatctattaagatattcatgtggtttttgttattggttctgtttctgtgatggattacgtttattgatttgcatatgttgaaccagtcttgcatgccagggctgaagccaactggatcgtaatgtataagctttttgatgtgctgctggattcagtttgccactattttattgaggatttttacattgatgttcatcagggaaattggcctgaaattttctttttttgttgtgtctctgtcaggttttggtatcaggatgatactggcctcataaaatgagttagggaggagtccctctttttctattgtttggaatagattcagaaggaatggtaccagctcttctttgtacctctggtagatatcggctgtgaatccatctgctcctgggctttttttggttggtaggctattaattactgcctcaatttaagaacttgttattggagacctcctcttttgcaatgcatttggaattcaggactaatcccaaatcaaatgcctatatcagtgtataagtattctttttttcttttgtcagcttgcaggtctggatgagggcaatttattttgccatctgaacttattttatatctaggtaaagcttatattacttttgaaatataagctttacctagacttgctatcacaaagtcagtgatagcatatcctactaggcaaattttactttttgttcgtttgtttgttttttcagtctgaaccaacaacaagcaaagttaaattatggatatccaagggagtctatagaaggtccatgcaaggtatggagagttcctcaacagaggtaatcaatcatcagcttctttttctacagatgaaggaaagagggtcactgggtttagggtgttacagtgatgaatggtgatatttgaagggaaaccaacaatatttcctaggagattaagtgactagctgaaaaattttgagttacgtctatcaataaaacatcaggggaattattaggtttagtgtagaccccagaactagtttgacaaagtcactccagcttccacaagctttgctgcagcttctagaactcttagacaagacaactatgctgtgactactagagctaatgaaagactgaaataaacaatagattttttgatgagtcccatgtcattgagtcaaagcccctagtgtttgttcagacttctcatgacaaaaaagaaaagtggggttgctaatcgagaatcttggaaaaagatattttgatacacagttattacagtaatctttgtgcttaaacatgagcattctttttttaactcaaaaaagggtttaatccttgaaagatatttatattagcatattttacttaaatataattaacagaaaaataaaaatatttttatcagctttttattagtaagtttggtaaataaaagagctctcataataattttaaattaatttaaattcaaaggatattggaaaatctaattattcccattgtctttcctttcatagatgacaaaacaaatcttgtgttacctaatagccattacagtaaacccaaagatagtttagacacaaaagacatattaatagcttgattattctgaatttgggtcctgaattttggaaagaatcaagaatagttgttccaggagacaagatgtaagtcataagtatctagggtccagaaataattatagatgacattgtaaaaaaattgctatgtgttagcaattaacaatagtcactagaaacaacattttattaaagcaaggagtcttttaaaaatgatgtaaaagtgtcaaaagcactgaaagttaacagaatattttattgacaaaagaaatattcactaatatgggcatagcataacttaatttttgtatattaaaaagactccaattctaattttactctttttgtacatcattcatgtaacattctacagtacagaatttattaatatggctttacatgtatgcatttaggcatacacagatatgtaaatatacaaatagaaaatacatttcaaattttacattttaactgtagctttaaaattaaatctattagataaaataatatgtatgtcaaaataaaatttaccctctgaataaatggtttcaactttcctaataaacaggaaatcaacaggatatttattctgtatacatatttgtgtttctctgtattaaacatttatattaattatcatctttaatcaaagtaatcaaccttccttttctttaggcaagaaagaaaaaggagagaaaacatgatttacttagatattttttggtctactagcatttatttcatacaatttaaacagtttcaatatataaatatatgatgtcattcaaaggaatttgcatgttttgttaatctattgtcattttaagaaataaacataattgtatttaatgatcagtgtttttatgtttatttagaaattgtgtaggcatccaaaggattattatcaattaaccattgtctaagtccttaaagttagttaaggatcaggaaattacaattttagttaacaaatgaaacttataatttgtagcattgtaagaattttataaaaattataaaggcatttattattatcattcactttagtttaatacaattttatatatattaaaataaaattctaaatttagacaagttatagaactagtggaatcttgttgaactcatacaactaatgtagaaaattcagtttaacaaaaaaaaatttaactttggccttatagaaaccaaaagattgggctgtcactagtttttgtattaaagtaattttttgaagactctgaatcatgccaaacatgtaatcttttaacttatatataatgccttttcttttctcttaattataataaaggctactatgtaaatatactgtttgtgcccacagaaagaaacacagtttaataacattttttcccctttttttcagacattttgactacttgtctgaactagatatcccttgaatgtgcacacaaaaagtgaatgggtcatttgataaggtaacgattaatttctgaagacaggggaaaagagagaaagagaggagggggaatagagggaaaaaaagaaagaaaagggagcccgctgcaggtgaataataaatcaacaccaaaaaaaaaaaggctaatgatgttccctctgaaaagagagggaggaaggtttatatgtaaaagaatagattttggaatataaaaagagtgacattaaaattggtttaagcccctggcgattttatcaattaactagcacttactaattcctaaagtatggaaataaaaggaggggctatcaccaactttaaacaaaagaatcactgttagacaaacagaacaatctcctcttgaaggtttcttcacttttataaagtgcctctaaagtaaaccatcgtgtttatattaaaagttcctcaaggtggccattgcaattccagattgtccttggtgaaactgtgcccactgtagagataaacatgcacgtttgtgttacattgcagaaatctcaaagaaacaggtatctggcctggaagaagtgcagttttaggttgagtggagcccatcagagatgcaatggtctgtaagggtggcacttgtctgaccttgattctccgatcttgagtctccagaatttgggcaaaggtcaattgtctacaatgagggctgagaaacgaaaaaaacagtagttctcaagctcacaaagataagacagaggaagtccttacaagtattgaaatggtgacctgacgcaaagtttatccaaaggccaaagtttgtctaaagcatgtcagtcctgaattctcagtccctggagccagaggacagacttatggggacttggcttgtcctttccttatggacttttccttgtatagacaaacaacacttaggacaatagacagatcatagaacagatgttagaggctagaaaacaatatttccaactgactagatttgcaataagttttacagactagaaagactccaaggatctattcctaggaaaacaaaataaacacattgctgacagttctcaacaaaatatcagagcctagccatgaacagggtcccacatgtatgcatcattactgagtcaagggtacttgcttaaggcagcaaggacttttgaagaatcttgtgaaactccatttttgtcaatccttcagagcccaagaccaccagaaaccctcctgtaatggaacaagttggctttattactaattgcaacaaggcttttgaaagccttctgtcatcttcctggggatcacctcttcaggtgtacagagacagcataggtaggttgtgggggaatggagaggaaggggagcttccctaagtgaaaacctaagtgttttcctaaacacaagcaccactgagcagtttgtagatggaattttgcaatcaaaattgcagggtattctgttcaagccacacctttttttcccctccatttggagataattaaaaattcccatgcacatgtaaaaaaaaaatagaaaaatctcttgtaccccttcccgcaatggtaacatcttgcaagaccatggtatatcagaacctggcattttttttttttttttttttttttttgtcagagtctcactccatcacccaggctggagtgcaactgtgtgatcacagttcacttcagccttgatctcctgggttcaaatgatcctctcatctcagcctcctgaggagctgggactacaggcatgcgccaccacgcccagctaatctttttcattttctttttttttccttttctttttttccttctttccttcttctctttcttctttctttctctctctttttcttttctttctcttttttctctttctttccctttctttttcctttctctttattctttctttctttctttctctctctctctctttctctctctctctctcatagagatagggtctcaggtctcactatgttgcctaggctcatctcaaactcctgcacagcccaaatattgacattaatacagttatgatgtagaacatttttgtcaccataaggatgcctcaaactccactctttagctacctctacttccctccaacccccaccacattcttaatccccggcaattacaaatctgtgttctccatttctataattttgtcattcaaggatgttatataaatgggatcactctgtatgattagtttttattttcacatagcatagctccctagagatttattcaagttaccaaatgtattaatggttcactcctttcattgctgagcagaattccatggtatgcatgtaccactgtttaactattgaaggctatctgagttatttccagtttggggctattacaaataaaactgcagtaatcactgacttataggtttttatgtaaccatatgttttcatttccctgggataaatgcccaggagtataattactggaatgcatggtagttgcatgtatagttttttaggaaacagccaaattgttttccagaatgaccgtatcattttacactctcaccagcaatgtctgagtgatccagtttctctgtatttgatgtagtcgctatgttttatttagccattctaataagtatgtagtaatacctcactgtggttttaatttgcatttccctaatgaccaacaatgttgaacaattttttatgtgcttatatgctatctgtatatcccctgaaatgtttgtttctatcttttgcacattttctaattggagtttttcatttgtttgcttgttttactgttgatattcaagagttctttatatattctaaataaccctgttttgataagtgatttgcaaatattctctcccagtctgtagcttgtattttcatcctcttagcagagtattttgtggagcaaaaatttatcatcttgacaagctccaatttatcaattttttcttttatggatcatgtttttggtgtcaattctaagaactctttgtcagtcctagatcccaaaaatttttttcctaaaaattttataattttacattctagggaaaactaggttccaagatggctgaataggaagagctccaatctgcagatcccagtgtgagcaacgtggaagacgggtgatttctgcatttccaactgaggtactgggttcatctcactggggcttgtcagacagtgggtgcagcccatggagcagggcggagcatcgcgtcacccaggaagcacaaggggtcagggaattccctttcctagcaaagggaagccatgacagatggtacctggaaaattgggacactcccaccctaatactgtgcttttccaactgccttagcaaacggcacaccaggagattatatcccgcacatggctcggagggtcccacgcccggctcggagggtcccacgcccacggagcctcgctcactgctagcataacagtctgagattgaactgcaaggtggcagccaggcttggggaggggcatccaccattgctgaggcttgagtaggtaaacaaagcagttgggaagctctaactgggtggagcccaccacagctcaaggaggcctgtctgcctttgtagactccacctctgggggcagggcatagctgaacaaaaggcagcagaaacttctgcagacttaaacgtccctgtctgacagctttgaagagagtagtacttctcccagcacggagtttgagatctgagaatggacagactgcctcctcaagtgggtccctgacccccgagtagcctaactgggaaaaacctcccagtaggggccgactgacacctcatacagctgggtgaccctctgagatgaagcttccagaggaaggatcaggcagcaacatttgccgttcttctatatttgctgttctgccgcttccactggtgatactcaggcaaacagggtctggagtggacctccagcaaattccaacagacctgcagctgagggtcctgactgttagaaggaaaactaacaaacagaaaggacatccacaccaataccccatctgtacgtcaccatcataaaagaccaaaggtagataaaaccacaaagatggggagaaaccagagcagaaaagctgaaaattctaaaaatcagagcgcctcttctcctccaaaggaatgcagctccttgccagcaacggaacaaagctggacggagaatgactttgaagagttgagagaagaaggctttagaccattggtaataacaaacttctccaagttaaaggaggatgttctaacccatcacaaagaagctaaaaaccttgaaaaaagattagacaaatagctaactagaataaactgtgtagagaagtccttaaatgacctgatggagctgaaaaccacagcacaagaactatgtgacgcatgcacaagcttcagtagctgatttgatcaagtggaagaaaggttatcagtgatttaagatcaaatgagtgaaatgaagcaagaagagaagcatagagagaaaaaagtaaaaagaaatgaaaaaagcctccaagaaatatgggaggactatgtgaaaagaccaaaactacgtctgattggtgtacctgcaagtgacggggagaatggaaccaagttggaaaacactcttcaggatattatccaggagaacttccccaacctagcgaggcaggccaacattgaaattcaggaaatacagagaacaccactaagatactcctcgagaagagcaactccaagacacataattgtcagattcaccaaagttgaaatgaaggaaaaaatgttaaaggcacccagagagaaaggtagggttacccacaaagggaagcccatcagactaacagcagatcccttggcagaaactctacaagccagaagagagtgggggccaattttcaacattcttaaagaaaagaattttcaacccagaatttcatatccagccaaactaagcttcataagtgaaggagaaataaaatcctttacagacaagcaaatgctgagagattttgtcaccaccaagcctgccttacaagagctcctgaaggaagcactaaacatggaaaggaacaaccagttccagccactgcaaaaacatgccaaattgtaaagaccatcaatgctaggaagaaactgcatcaactaacaagcaaaataaccagctaacatcataataacaagatcaaattcacacataacaatattaacctcaaatgtaaatgggctaagtgctctaattaaaagacacagactggcaaatcagataaagagtcaagacccatcagcgtgctgtattcaggagacccacctcacatgcagaaacacacataggctcaaaataaagggatggaggaagatctaccaagcaaatggaaaacaaaaaaaagcaggggttgcaatcctagtctctgataaagcagactttaaaccaacaaagatcaaaagagacaaagaaggctgctacataatggtaaagggatcgactcaacaagaagagctaactatcctaaatatatatgcacccaatacaggagcacccagattcataaagcaagtccttagagacctacaaagagacttagactcccacacaataataatgggagactttaacaccccactgtcaacattagacagatcaacaagacagaaagttaaccaggatatccaggagttgaactcagctctgcgcaaagtgaacctaatagacatctacagaactctccaccccaagtcaacagaatatacattcttctcagcaccacatcacacttattccaaagtttaccacatagttggaagtaaagcactcctcagcaaatataaaagaacagaaattataacaaactgtctctcagaccacagtgcaatcaaactagaattcagggttaaacttactcaaaacttcgcaactacgtggaaactgaacaatctgttcctgaatgactactgggtacataacaaaatgaaggcagaaataaagatgttctttgaaaccaatgagagcaaagacacaacacaccagaatctctgggacaatttaaagcagtgtgtagagggaaatttatagcactaaatgcacacaagagaaggcaggaaagatctaaaatttacaccctaacatcacaattaaaagaactagagatgcaagagcaaacacattcaaaagctagcagaaggcaagaaataactaagatcaaagtaaaactgaaggaaatagagacacaaaaacccttaaaaaaaatcaatgaatccaggagctggctttttgaaaagatcaacaaaattgatagactgctagcaagactaataaagaagaaaagagagaagaatcaaatagatgcaataaaaaataataaaggggatatcaccactgatccaacagaaatacaaactaccatcagagaatactatacacacctctaagcaaataaactagaaaatctagaagaaatggataaattcctggacacatataccctcccaagactaaatcagaaagaagttgaatccctgaatagaccaataacaggttctgaaattgagggaataattaatatcctaccaaccaaaaaaagtccaggaccagatggattcacagccgaattctaccagaggtacaaagaggagctggtaccattccttctgaaactattccaatcaatagaaaaagagggaatcctccctaattcattttatgaggccaacatcatcctgataccaaagcctggcagagacacaacaacaaaagagaattttagactgatgtccttcatgaacattgatgcaaaaatcctaaataaaatactggcaaaccaaatccagcagcacatcaaaaagcttatccaccacgatcaagttggcttcatccctgggatgcaaggctggttcaacatatgcaaatcaataaacgtaatccatcatgtaaacagaaccaaagacaaaaaccacatgattatctccatagatgcagaaaaggccttcaacaaaattcaacaacccttcatgctaaaaagtgtcaataaactaggtatttggacgtatctcaaaataataagagctatttatgacaaacccacagccaatatcatactgaatgggcaaaaattggaagcattccctttgaaaactggcacaagacagggatgccctctctcaccactcctattcaacatagtgttggacgttctggccagggcaatcaggcaagagaaagaaataaagggtattaaattaggaaaagaggaagtcaaattgtcactgtttgcagatgacatttagaaaaccccatcgtctcagcccaaaatctccttaagctgataagcaacttcagcaaagtctcaggacacaaaatcaagtgcaaaaatcacaagcattcctatatgctaataacagacaaacaaagagccaaatcatgaatgaactcccattcacaattgcttcaaagagaataaaatacctaggaatccaacttacaagggatgtgaagggcctcttcaaggagaactacaaaccactgctcaatgaaataaaagaggacacaaacaaatggaagaacattcaatattgtgaaaatggccatactgcccaaggtaatttatagatcaatgccatccccatcaagctaccaatgactttcttcacagaattggaaaaaactactttaaagttcaaatggaaccaaaaaagagcccgcattgccaagacaatcctaagccgaaagaacaaggctggaggcatcatgctacctgacttcaagctatactacaaggctacagtaaccaaaacatcacggtactggtaccaaaacagagatatagaccaatggaacagaatagagcctccagaagtaataccatacatctacaagcatctcaactttgacaaacctgacaaaaacaagcaatggggaaaggattccctatttaataaatggtgctgggaaaactggctagccatatgtagaaagctgaaactggatctcttccttacaccttacacaaaaattaattcaagaaagatcaaagacttaaatgtaaaacctaaaatctggctaatatccagaagctacaaagaacttaaacaaatttacaagaaaaatcaaacaaccccatcaaaaagtgggcaaaggatatgaacagacacttctcaaaagaagacatttatgcaaccaacagacacatgaaaaaatgctcatcatcactggccatcagaggaatgcaaatcaaaaccacaatgagataccatctcacaccagttagaatggcaatcattaaaaagtcaggaaacaacaggtactggagaggatgtggagaaataggaacgcttttacactgttggtgggactgtaaactagttcaaccattgtggaagagagtgtgccaattcctcaaggatctagaactagaaataccatttgacccagccatcccattactgggcatatacccaaaggattataaatcatgctactatagagacacatgcacacgtatgtttattgtggcactattcacaatagcaaagacttggaaccaacccaaatgtccatcaatgatagactggattaagaaaatgtgacacatatacaccatggaatactatgcagccataaaaaaggatgagttcatgtcctttgtagggacatgaatgacctggaaaccatcattctgagcaaactatcgcaaggacagaaaaccaaacactgcatgttctcactcataggtgggaattgaacaatgagaacacttggacacagggtggggaacatcacacaccggcgtctgtcatggggtggggggagggggagggatagcattaggagatatacctaatgtaaatgagtagttaatgggtgcagcacaccaacatggcacatgtatacatatgtaacaaaactgcacgttgtgcacacgtaccctagaacttaaagtaaaataataataataataaaaactttacattctacatgaagtccatgctgcattttagttaatttttgtataaggtgtgagatttagttcaaggtttgtttttttgcctatggctatccaattgctccagtgcctctgaaaagcctatctttcctccactgtattgtttttgcacttctgtaaacaattaagttgggcatagttatgtgggtctgtttctgggtttctattcttttctgttgatctatctgtttgtccttcagccaataccatacattcttaattactttaactataaaataagtcttgaaattagatggactgattcttcccacttcaatcttctttttcaaagtgtttttgctgttctagttcctctgccttgtcatttaagatttagaataatcctatctatatctacaaaaaaacttacaaggattttactgggaatttcataattttgtatataaatctggggagaattgacatctttattccattgtcttctaatctatgacatggcatgtttctccatttctttaaaactttgatttctttcaccaataatttgtagttttcagcatgcaagtcctgtacatgtcttgtgagatttacacctgtctttcattttaatttttattgaatataaatagtattgcattttaactccagtgtgctcatatgtgtattactagtttataaaatataatatattttctgtttattttgtattctgccactttgttaaattcacttattagctctatgagatttttgttttctttgtgtgtgtgcacgtatgtgtatgtttgtaggtctcttggggttttctatgtaactatgtcatctacagataggaagcattttatctcttcctttctaatctatatgatatttatttcctttttgtgtttttgcctcatttcactggttagaacttatagcactatgttgaataagacagtgagaatgggcatccttgcattgctcctgatcttatgggggagacactcagtcttttactatgaagtataatgttatctgtaggttttttgtatatgctctttatcaagttgaggaagttcctctttactgctatatttctgagagttttgattgtgaatggatattgaattttgtcatgcacttttaaaaatattaattgatatgattacttggtcatggtataattcttttcatatattgctaaattttatttgatggtattttgctaagagtattttgcacctacattcacaggggatattcatccatagtcttttgttttgttctgtattaactttgcctcgttttggtatcagggtaatacttagcttcaataaaataaattgggaaatacctttctcttctattttctggaagacactgtatggaattggtgttaattcttatttaaatagttggcagaattctccagtgaagccatctggatctggaggtttcttttttgagagtttttcaattgagaatttaatttccttaatagttatggggatattcaaattatctatttaatgttcggtgagttatttttcattttatgaggaattagtctagttcctctaagttgtgaaacttatgtttgtagggttattcaaagcattttctcattatccttttgatgcctcaggtatctatcgatagtgttatctcctgttttattcctgacaatggaaatttatgtctgttctacttttttttcgtacctcttgctagagatttgtcaattgtatcaggagatgtaacattttatttaatatatgcaaattttaattcattattgactttgtctattctgctactataagaaagttacctggccaggcatggtggcccacgcctataatctcacggtttgaaggccaaggtgggaggatcacttgagctcagaagttcaagaccagcctgtgcaacatggagatacagcatctctacaaaaaagaaaaaatagctgggcatggtggcatgcacctgcaatcgattgtattgacttttttcaaataaccagtttttcatttcatttttttctctatttttttctgttttcaatttcttgatttctgctctttactatctccttccttttgcttgctttttttttttcttgaggatggagcttatattcttatttcgtgacttttcctttttgtaatgtatgaatttagtgttatacagttttgtcctaatactgcatttgctacatctcacaaatttatattttcacttttattcagtttaatatattttttgtttcccttgagatttcctttttgacccatggattattcagaagtgtgttgtttagttttcaagtgttttgagggtttcctgttatcttgctgctgttgatttctagtttgattcccttgtagttagagaacacattctatattatttcaattatttgaaatctatcgaggtttgttttatgtcccaggatgtggtttatcttggtataagttttgtgaacacataaaagcataagtattctgcttttgttgggtgaagtgttttatacatgtcaatttgatcctgttggttgatggtgtttttagtttttctatacctttgctgagtttttgtctatttgcttcatcaattgctgagagaggtccttgaagtcactaaatatctctcctttcagttttatcagttttgcttcagttttgcaactctgttgtttggcgcatacccatttagaattggtacgtcttcttagtggttaaaccctgttatttttatatagtgtccctcactgtctctggcaatgtcatttgctttgaagtccattttagttaatactgaaagagccattccttatttcctttgatttgaataacatgcatttttccatccttttactttcaaccagccaatactgctatttgaagtgtttgttataggcggtacataattcggtcatttaaaaaatatattccattcctctatcttttaattggtatatttagactacttatatttaatgtaattattgatgaatgagggatgtctgccattttattttttttctgtttttattatctgttttctttttcctgccttgttgttggttatctgaacactttttagaattccatttttatttatctgtaatgtttttgagtgtatccctttgtatatcattttagtggaagctctaggtatttctctctatatatataatatatatgtatataaagatatacatatatatatatcttatgatagtctattagcatcatcattctaccagttcaagtgaagtatagaaaacttcttatttcctcttatgtctctttgccttccctcatttataatataactatctcaataattcctctacatccatttaaaaccacatcaggcagcattaatgtttttgtttcaaaacattaaatgtaacttagactctaaaagggaaggacagcctattgtatttacacatattttggcttaccatgttctttcttattttctaatattctaagtttccttcttttataaattcctttctgtttagagaacttcctttagtcattctttgtttgtttgttttttgttttgttttgttgttgttttttttttttttgagatggagtttcgctcttgttgccccagctggagtgcaatggcatgatctcggctcattgcaacttctgcctcccaggttcaggcaattctcctgcctcagcctcccgggtagcagaggtgacaggtgcctgccactgggcccgctaatttttgtatttttagtagagacggagtttcaccatgttggccagactggtcttgaactcctgacctcaggtgatctgccagcctcagcttcccaaactgctgggattacgggcgtgagccaccaaacccagcctagtcattcttttaagataggtctgctggcagcaaagtcttagttttccgtctgaaaaagtcttgatttttctctttgtacttgaaggatatttttgctggacatagaatactagtttggcaggtcttttctttcagcatttgagaaatgtgccatttctttctgtcctccatagtttctgatgagaaatctgctattcagtagttttaggctgcaatatcatagtaaggtattcatgtcaacagggtcagtaggtcacaagttctctaagtttgaagcgtcagcttcaaccaaacaaattaatggctattctacattcaaaaatcaggaaatttaaatttattatgaaatgtaatgcagcatgtagtaaagacttaaccagtgttttaaaactcaactttcaaagaaaagatagtattgctccctgtttcattaaaacctagagagatgtaatcagtaagcaagaaggaaaaagggaaattcacaaagtaactttttgtgtctgtttctttttaacccagcatggagagaaaatttatgtccttgcaaccatccatctccgtatcagaaatggaaccaaatggcaccttcagcaataacaacagcaggaactgcacaattgaaaacttcaagagagaatttttcccaattgtatatctgataatatttttctggggagtcttgggaaatgggttgtccatatatgttttcctgcagccttataagaagtccacatctgtgaacgttttcatgctaaatctggccatttcagatctcctgttcataagcacgcttcccttcagggctgactattatcttagaggctccaattggatatttggagacctggcctgcaggattatgtcttattccttgtatgtcaacatgtacagcagtatttatttcctgaccgtgctgagtgttgtgcgtttcctggcaatggttcacccctttcggcttctgcatgtcaccagcatcaggagtgcctggatcctctgtgggatcatatggatccttatcatggcttcctcaataatgctcctggacagtggctctgagcagaacggcagtgtcacatcatgcttagagctgaatctctataaaattgctaagctgcagaccatgaactatattgccttggtggtgggctgcctgctgccatttttcacactcagcatctgttatctgctgatcattcgggttctgttaaaagtggaggtcccagaatcggggctgcgggtttctcacaggaaggcactgaccaccatcatcatcaccttgatcatcttcttcttgtgtttcctgccctatcacacactgaggaccgtccacttgacgacatggaaagtgggtttatgcaaagacagactgcataaagctttggttatcacactggccttggcagcagccaatgcctgcttcaatcctctgctctattactttgctggggagaattttaaggacagactaaagtctgcactcagaaaaggccatccacagaaggcaaagacaaagtgtgttttccctgttagtgtgtggttgagaaaggaaacaagagtataaggagctcttagatgagacctgttcttgtatccttgtgtccatcttcattcactcatagtctccaaatgactttgtatttacatcactcccaacaaatgttgattcttaatatttagttgaccattacttttgttaataagacctacttcaaaaattttattcagtgtattttcagttgttgagtcttaatgagggatacaggaggaaaaatccctactagagtcctgtgggctgaaatatcagactgggaaaaaatgcaaagcacattggatcctacttttcttcagatattgaaccagatctctggcccatcaggctttctaaattcttcaaaagagccacaacttccccagcttctccagctcccctgtcctcttcaatcccttgagatatagccaactaacgacgctactggaagccccagagcagaaaagaagcacatcctaagattcagggaaagactaactgtgaaaaggaaggctgtcctataacaaagcagcatcaagtcccaagtaaggacagtgagagaaaagggggagaaggattggagcaaaagagaactggcaataagtaggggaaggaagaatttcattttgcattgggagagaggttctaacacactgaaggcaaccctatttctactgtttctctcttgccagggtattaggaaggacaggaaaagtaggaggaggatctggggcattgccctaggaaatgaaagaattgtgtatagaatggaagggggatcatcaaggacatgtatctcaaattttctttgagatgcaggttagttgaccttgctgcagttctccttcccattaattcattgggatggaagccaaaaataaaagaggtgcctctgaggattagggttgagcactcaagggaaagatggagtagagggcaaatagcaaaagttgttgcactcctgaaattctattaacatttccgcagaagatgagtagggagatgctgccttcccttttgagatagtgtagaaaaacactagatagtgtgagaggttcctttctgtccactgaaacaaggctaaggatactaccaactactatcaccatgaccattgtactgacaacaattgaatgcagtctccctgcagggcagattatgccaggcactttacatttgttgatcccatttgacattcacaccaaagctctgagttccattttacagctgaagaaattgaagcttagagaaattaagaagcttgtttaagtttacacagctagtaagagttttaaaaatctctgtgcagaagtgttggctgggtgctctccccaccactacccttgtaaacttccaggaagattggttgaaagtctgaataaaagctgtcctttcctaccaatttcctccccctcctcactctcacaagaaaaccaaaagtttctcttcagagttgttgactcatagtacagtaaagggtggaggtgatatggcattctgaaagtagggagggactaagtcagtcatcatactaaacaaaaatcccagtaccctttccttatttagctaccagaatgatgacagacagactcaaaccctgtcaagacaggaccctggaggatcctcctatggggaaactgcataatctgaaaaaaaggctgacagatacaaatagttgaggatccttcaacacaaaagctgcgtgtctgccctattactcacctgacgatgaagcccacaatgcaacaaatcccttccactcacagcatttggtcaacctgtcagagcctcattcttaattatgaaaagtagtcaatgaacacaatacatttgagggaaaggccgtaacatgaaaggcaccaacaaataaatgtgagagtagatagagaccttttgagtataaaagatcctccaaaataagagattaaaccaagatagaggaaaacacagtagctgggaaacaaggaatccaacgcaggagaaagtgaagagaattcccaggatgttggtgtgtagcaggcttagaaagcaagtcattcatgttggagcaggactcttaaaggactctaggagagatgtctcccagaaaaagaagaaattaattgattcatacacattgagagggatttagatttctcttgcagagattgagataaactagtcgtaaatacatagaaaaataagcaagtaaaaacgcaatacagtttttaagtgctagaggaaaagaaacttttgtattagagaggaaatataaccacagtacactacatggctcagctgtgaataatatttacatagaggataatgtgaatataatagtctcccattatctgtggttttgctttctgcagttcagttacagccagccagtctgaaaatattaaatggaaaattccagaaataattcttaagttttaaaacatgtgctgttttgagtagcatgttgaaatctcgcactatcaccctccacccatgttctgggcagggcaaagtgggatggtgtgagatttctccagtggatccacaatgtatatgctacccacccatgagtcacttagtcatcatccagttgctcagatcaactgttgtggtataacagtgcttgtgttaaagtcactcttattttacttactaatgtccccaaagcataagagtagtgatgctggcaaataagatacaccaaagagaagctgtaaagtgcttcctctaacagaaaatgtgaaagttcttgacttaataaggaaagaaaaaaaacacatgctgaagttgctaagatctacagtaagaacaaatccatctgtaaaattgtgaagaaggcaaaagaaatttgtgctagttttgctgttgcaccacaagctgcaaaaattatttattacaccccacggtgtgtgataaacacttagttaagatgaaaaggtattaaatttgtgggtggaagacatgaacagaaatgtgttccaattgacagcaatcgggtttggtactatttgggtttggtgctattcgtattcagggtcttggaatgcaactcccacagataagggggtgctgctggagtgaaatactgtgatataacctttttttcaggaaatgaagggagaagatgtgtacgtgtgtgggagaggtataagagacctaggttgccatattctatcacagaaaatgcataataactaaatctggaaaatgatgaatagctgtacaaccatattatttagcaataggaggtaaatacaggtagaagcagaagaaagaatgggcaggggttacctctatggagaagctggggtgggaggatagggtggggacttattttacgaactgtgtaattgcctaacttgtgaatatgtatttctgaagtaaaataaaaattaagttaaaattaaattttaaaattcaaa

SEQ ID NO: 443 - DNA, 3438 bp, Homo sapiens
  source 1..3438: mol_type = genomic DNA; note = NC_000011.10:637269-640706 DRD4 [organism=Homo sapiens] [GeneID=1815] [chromosome=11]
gttgtccgcggtgctcagcgcccgcccgggcgcgccatggggaaccgcagcaccgcggacgcggacgggctgctggctgggcgcgggccggccgcgggggcatctgcgggggcatctgcggggctggctgggcagggcgcggcggcgctggtggggggcgtgctgctcatcggcgcggtgctcgcggggaactcgctcgtgtgcgtgagcgtggccaccgagcgcgccctgcagacgcccaccaactccttcatcgtgagcctggcggccgccgacctcctcctcgctctcctggtgctgccgctcttcgtctactccgaggtgagccgcgtccggccgcacgagcatcctcacctgctcctcggttccccgtccctgtccctacggaggacccggcgcgacccggcccctttctggtgcggagcttccagctggggcggcggcaggggcgctgcgccttgtccctcggcgatacacccaccgccgccacctcgcgaccttccacccgctgcgctgtctgtcccccgaccctcgttcctcttctccttccccgtctgtcttggcgtctgttatccaggagatgcccgtccttctatccagggaccccggaaacaggcgactttgtcaagcccagtcccctccgtagctggatttcacctccagggcagccagctggacagacaggcagatgcaggctcagccccctggctgccgtgggacacacacacacacacactgccacagccactgcccaccacacacacctagtgcagatgctggcacacccccagaaggaggctcacagctcgcaggggagacctgggctggacaaaacccaggggaggggagggtgtgtggggaccaggcccctgctgagaaccctggggggaagcctgagggggaattgggggatggagcccacactccacaccaggtctggccctcgagtgggtcggccttggtgccagcccctctgcggccagagaaaagcagcttagggctgagctggagacgcggtgtccccgactgtgggggagggggactcgaggtttccccttgatggacacagtgaatccaggcggctggggcagagaccagcagcacgggacacgcgtgacctgtgctcctttcgagccgcagacgtcacagtgacgacgtttaagctcctaatctccccaaatcggcgggaaggattagaggggctgcctgctcctttgcccttggagagagtcactccacgtggagtcctacgctgggcactgggcacggtcttcatatttttaattataatttatcttcaagacaattatgatgtggatactatcatcacccttgtcttacagatgaagaaacagaaatgaattaacgtgcccgagtctcccacagagaacttagccaacagagcagccagcttcgcttctaggcccagcggggaccctgcctaccccaggctggggaggggctccctttgagcccgatgatatcaggcccgcccccagggaattccccaggccgttctcatgtttgtaacaaaagggagaccaaggccagaagccgtgattcacgcctgtaatcccaggactttgggaggcaaaggcaggaggatagtttgagaccagcctgggaaacataccaggcctggtctctacaaaaaattttaaaatatcagccgggggtggtggctgcggctgttgtcccagctattcgggggagctgaggcggcagaatcgcttaaacctgggaggcggaggttgcagtgagttgagatctcaccactgcactccagcctgggcaacaagagcgaaactccgtctcaaaaaacaaaaagaaaaacaaatcagccgggggtggtggcgcgcggctgtaatcccagctactctggagactgaggtgggaggatcgcttgagctcaggaattccaggctacagtgagccatgatggagccacagcactccagccgcggtgacacagcgagaccctaactcaaaacaaagggagatctgcgtggggaaggggtgtttccctgcccggtcctctggcctctggctcacagccgggcccccttctccgtattcagccctggaactacccataagagtgggggcgggtcacaagggcccgcggtggctgggaaacctcagggcctgtggtgtcgccgcgcaggtccagggtggcgcgtggctgctgagcccccgcctgtgcgacgccctcatggccatggacgtcatgctgtgcaccgcctccatcttcaacctgtgcgccatcagcgtggacaggtgcgccgccctccccgcccgcgccccggcgcccccgcgccccgcccgccgccctcaccgcggcctgtgcgctgtccggcgccccctcggcgctccccgcaggttcgtggccgtggccgtgccgctgcgctacaaccggcagggtgggagccgccggcagctgctgctcatcggcgccacgtggctgctgtccgcggcggtggcggcgcccgtactgtgcggcctcaacgacgtgcgcggccgcgaccccgccgtgtgccgcctggaggaccgcgactacgtggtctactcgtccgtgtgctccttcttcctaccctgcccgctcatgctgctgctctactgggccacgttccgcggcctgcagcgctgggaggtggcacgtcgcgccaagctgcacggccgcgcgccccgccgacccagcggccctggcccgccttcccccacgccacccgcgccccgcctcccccaggacccctgcggccccgactgtgcgccccccgcgcccggccttccccggggtccctgcggccccgactgtgcgcccgccgcgcccagcctcccccaggacccctgcggccccgactgtgcgccccccgcgcccggcctccccccggacccctgcggctccaactgtgctccccccgacgccgtcagagccgccgcgctcccaccccagactccaccgcagacccgcaggaggcggcgtgccaagatcaccggccgggagcgcaaggccatgagggtcctgccggtggtggtcggtgggttcctgtcctgaggggcggggaggagaggagggggggggtacgaggccggctgggcggggggcgctaacgcggctctcggcgcccccaggggccttcctgctgtgctggacgcccttcttcgtggtgcacatcacgcaggcgctgtgtcctgcctgctccgtgcccccgcggctggtcagcgccgtcacctggctgggctacgtcaacagcgccctcaaccccgtcatctacactgtcttcaacgccgagttccgcaacgtcttccgcaaggccctgcgtgcctgctgctgagccgggcacccccggacgccccccggcctgatggccaggcctcagggaccaaggagatggggagggcgcttttgtacgttaattaaacaaattccttcccaaa

SEQ ID NO: 444 - DNA, 3436 bp, Homo sapiens
  source 1..3436: mol_type = genomic DNA; note = NT_187586.1:167142-170577 DRD4 [organism=Homo sapiens] [GeneID=1815] [chromosome=11]
gttgtccgcggtgctcagcgcccgcccgggcgcgccatggggaaccgcagcaccgcggacgcggacgggctgctggctgggcgcgggccggccgcgggggcatctgcgggggcatctgcggggctggctgggcagggcgcggcggcgctggtggggggcgtgctgctcatcggcgcggtgctcgcggggaactcgctcgtgtgcgtgagcgtggccaccgagcgcgccctgcagacgcccaccaactccttcatcgtgagcctggcggccgccgacctcctcctcgctctcctggtgctgccgctcttcgtctactccgaggtgagccgcgtccggccgcacgagcatcctcacctgctcctcggttccccgtccctgtccctacggaggacccggcgcgacccggcccctttctggtgcggagcttccagctggggcggcggcaggggcgctgcgccttgtccctcggcgatacacccaccgccgccacctcgcgaccttccacccgctgcgctgtctgtcccccgaccctcgttcctcttctccttccccgtctgtcttggcgtctgttatccaggagatgcccgtccttctatccagggaccccggaaacaggcgactttgtcaagcccagtcccctccgtagctggatttcacctccagggcagccagctggacagacaggcagatgcaggctcagccccctggctgccgtgggacacacacacacacactgccacagccactgcccaccacacacacctagtgcagatgctggcacacccccagaaggaggctcacagctcgcaggggagacctgggctggacaaaacccaggggaggggagggtgtgtggggaccaggcccctgctgagaaccctggggggaagcctgagggggaattgggggatggagcccacactccacaccaggtctggccctcgagtgggtcggccttggtgccagcccctctgcggccagagaaaagcagcttagggctgagctggagacgcggtgtccccgactgtgggggagggggactcgaggtttccccttgatggacacagtgaatccaggcggctggggcagagaccagcagcacgggacacgcgtgacctgtgctcctttcgagccgcagacgtcacagtgacgacgtttaagctcctaatctccccaaatcggcgggaaggattagaggggctgcctgctcctttgcccttggagagagtcactccacgtggagtcctacgctgggcactgggcacggtcttcatatttttaattataatttatcttcaagacaattatgatgtggatactatcatcacccttgtcttacagatgaagaaacagaaatgaattaacgtgcccgagtctcccacagagaacttagccaacagagcagccagcttcgcttctaggcccagcggggaccctgcctaccccaggctggggaggggctccctttgagcccgatgatatcaggcccgcccccagggaattccccaggccgttctcatgtttgtaacaaaagggagaccaaggccagaagccgtgattcacgcctgtaatcccaggactttgggaggcaaaggcaggaggatagtttgagaccagcctgggaaacataccaggcctggtctctacaaaaaattttaaaatatcagccgggggtggtggctgcggctgttgtcccagctattcgggggagctgaggcggcagaatcgcttaaacctgggaggcggaggttgcagtgagttgagatctcaccactgcactccagcctgggcaacaagagcgaaactccgtctcaaaaaacaaaaagaaaaacaaatcagccgggggtggtggcgcgcggctgtaatcccagctactctggagactgaggtgggaggatcgcttgagctcaggaattccaggctacagtgagccatgatggagccacagcactccagccgcggtgacacagcgagaccctaactcaaaacaaagggagatctgcgtggggaaggggtgtttccctgcccggtcctctggcctctggctcacagccgggcccccttctccgtattcagccctggaactacccataagagtgggggggggtcacaagggcccgcggtggctgggaaacctcagggcctgtggtgtcgccgcgcaggtccagggtggcgcgtggctgctgagcccccgcctgtgcgacgccctcatggccatggacgtcatgctgtgcaccgcctccatcttcaacctgtgcgccatcagcgtggacaggtgcgccgccctccccgcccgcgccccggcgcccccgcgccccgcccgccgccctcaccgcggcctgtgcgctgtccggcgccccctcggcgctccccgcaggttcgtggccgtggccgtgccgctgcgctacaaccggcagggtgggagccgccggcagctgctgctcatcggcgccacgtggctgctgtccgcggcggtggcggcgcccgtactgtgcggcctcaacgacgtgcgcggccgcgaccccgccgtgtgccgcctggaggaccgcgactacgtggtctactcgtccgtgtgctccttcttcctaccctgcccgctcatgctgctgctctactgggccacgttccgcggcctgcagcgctgggaggtggcacgtcgcgccaagctgcacggccgcgcgccccgccgacccagcggccctggcccgccttcccccacgccacccgcgccccgcctcccccaggacccctgcggccccgactgtgcgccccccgcgcccggccttccccggggtccctgcggccccgactgtgcgcccgccgcgcccagcctcccccaggacccctgtggccccgactgtgcgccccccgcgcccggcctccccccggacccctgcggctccaactgtgctccccccgacgccgtcagagccgccgcgctcccaccccagactccaccgcagacccgcaggaggcggcgtgccaagatcaccggccgggagcgcaaggccatgagggtcctgccggtggtggtcggtgggttcctgtcctgaggggcggggaggagaggagggggggggtacgaggccggctgggcggggggcgctaacgcggctctcggcgcccccaggggccttcctgctgtgctggacgcccttcttcgtggtgcacatcacgcaggcgctgtgtcctgcctgctccgtgcccccgcggctggtcagcgccgtcacctggctgggctacgtcaacagcgccctcaaccccgtcatctacactgtcttcaacgccgagttccgcaacgtcttccgcaaggccctgcgtgcctgctgctgagccgggcacccccggacgccccccggcctgatggccaggcctcagggaccaaggagatggggagggcgcttttgtacgttaattaaacaaattccttcccaaa

SEQ ID NO: 445 - DNA, 6595 bp, Homo sapiens
  source 1..6595: mol_type = genomic DNA; note = NC_000017.11:7023050-7029644 BCL6B [organism=Homo sapiens] [GeneID=255877] [chromosome=17]
gagaccccgccccccttaagaagagaagccgcggcccctgcaggacgggggtaagaacaagagactgagggagccagactcctgggtcccccaagagggtaggagcttgtgtggagcttgccatcagcgagcctgagtcccagaaattgggctaaactagggattggggactagataggagtcgcagaattccgtagttcggggaagggagcctcggctgggatttggaggtgtgtggacggcaggccgtgagatctcgaggcagggttggacacctgagacacaggcgcgcagaggggagtggcggtgctggaggggcactgggggtcgaacccagggcgatgggcgcgggattccccacgctcgccaacgacgccgcggtgtggaaccttcaactggctccaagcgctgtgggatctggaagaggcaagggagcgagggtgtcgtagagggcagaatgaacaagaagaattaggagggaggctgcgtgtgccggggctaggggctggaagtcctggctctagttgcacctcggaaggaaaaggcaaacagaggagggaaggcgtcttaggactgcctggatccagagcactttccacggcctctacaggcctgtgtcgctatgggttcccccgccgccccggagggagcgctgggctacgtccgcgagttcactcgccactcctccgacgtgctgggcaacctcaacgagctgcgcctgcgcgggatcctcactgacgtcacgctgctggttggcgggcaacccctcagagcacacaaggcagttctcatcgcctgcaggttcgaggggtggggcctggggcggggccaaatgggaaaggggtgggaccacagggccgttgagagggaatccgaagccaagtctttcagaagcaggaggcggagcgtcccagaattgggggcggggtgatagtgaggaggcgggactttttcagggggcggggcttcctgaagctgcgcatgtctcccttggttccccagcccccaaaggacttatctgctctctctctagtggcttcttctattcaattttccggggccgtgcgggagtcggggtggacgtgctctctctgcccgggggtcccgaagcgagaggcttcgcccctctattggacttcatgtacacttcgcgcctgcgcctctctccagccactgcaccagcagtcctagcggccgccacctatttgcagatggagcacgtggtccaggcatgccaccgcttcatccaggccaggtgagggaccctggctcggcgttctctgtgggtgaggtgttaagggcaaaggcagagtttaggaaatggcactaacgttcatcacactttccccagctatgaacctctgggcatctccctgcgccccctggaagcagaacccccaacacccccaacggcccctccaccaggtagtcccaggcgctccgaaggacacccagacccacctactgaatctcgaagctgcagtcaaggcccccccagtccagccagccctgaccccaaggcctgcaactggaaaaagtacaagtacatcgtgctaaactctcaggcctcccaagcagggagcctggtcggggagagaagttctggtcaaccttgcccccaagccaggctccccagtggagacgaggcctccagcagcagcagcagcagcagcagcagcagtgaagaaggacccattcctggtccccagagcaggtacagagtctagaacctcaagaatttgtcagagctggcctcagctagaagacagagtcattgggccttgatggtcaggaggaagggagataggtggtgggtttcagagacactagctcaccttaaggagctggccagagaccaggtttattcagcagggtggcacttgggcagtacaatggatgtggctcattggtcaacaatattggctcaccctgagagggcaggcctttggctccaaatttcccaggagagaacccccacccctcaaccgtacaatctcttttaaccctttccttgccatctgcctaggctctctccaactgctgccactgtgcagttcaaatgtggggctccagccagtaccccctacctcctcacatcccaggctcaagacacctctggatcaccctctgaacgggctcgtccactaccgggtaagagcccctctttcttggcttttctcccgtgactgctccaggcaagtttgtgccaaaaactctcccagaaaggcctattccaatggttcctaaactttattacaaattagaatcacctaggaagcttttaaactcccactgcccaggtcacactccatagattaaaatatctggacatgggacgagtcatcagtatttttctaaagctctcccagtgcttccaatgagcagcaaagtttgagaatttctggcctatcccctttcagagctgaatggtcagcccaaagcttgtcagggcctctctggcaggctgtcattcagagtggtgcaagtgaggaggagattttagccaagcatggtggctcatgcctgtaatgccagcactttgggaggccagtgcaggaggatcacttgaatccaagagctcaaggccagcctgggcaacatagtcagatgtggtctctacaaaaaataaaaatgaaaattagccgggcacggtggtgcacacctgtagtcccagctactcaggaagctaaagtggaaggatcgtctgaacccgggaggtggagattgcagtgagccgagatcacaccactgcactccagcataggcaacacagcaagactctgtctcaaaaaaaaaaaaaaaaaaaaaaacaggaggagaaacaaaactcctcccactagcaggggcctccacctaccaccactgcttttattttatttatttatttttttgagacggagtctcactctgtggccaggctgaagtgcagtgccgcaatctcggttcactacaacctccacatcccaggttcaagcgattctcctgcctcagcttcccgagtagctgggactacaggcacgtgccaccacacccagctactttttgtatttttagtagagacgaggtttcaccatgttggccaggatggtctccatctcttgaccttgtgatccgaccgcctcggcctcccaaagtgctgggattacagtcgtgagccaccgtacctggcccccaccactgctattgaagaggagattagctgagtactcgagtcagacagatgtgcagtcagatctggctcatcttactatcttcttacttggccttgagcaagtcaaaccagccccagaagtcttaacaataaattgggaaacagaaagcctgctactgtgtggtttgaggattcagtagtacctagatagccctcattaataactatggttgccgtcacccattccccttcccaggaagtgaatttttcagctgccagaactgtgaggctgtggcagggtgctcatcggggctggactccttggttcctggggacgaagacaaaccctataagtgtcagctgtgccggtcttcgttccgctacaagggcaaccttgccagtcatcgtacagtgcacacaggtaggggaagagagggccctggccttcaagcccacagctgtcctagggcaaagtccctgatctcccatgttctctgcctccaggggaaaagccttaccactgctcaatctgcggagcccgttttaaccggccagcaaacctgaaaacgcacagccgcatccattcgggagagaagccgtataagtgtgagacgtgcggctcgcgctttgtacaggtacggagccagcctccaagtggcttccaaggcaaacctgcaagaggtggggtgggccaatagggagggttctgttcctcccagaggcaggacttgaagtctcctccctcccaggtggcacatctgcgggcgcacgtgctgatccacaccggggagaagccctacccttgccctacctgcggaacccgcttccgccacctgcagaccctcaagagccacgttcgcatccacaccggagagaagccttaccacgtgggtacccaacctggcctgcccactgccttagaattacctctcctttgcctaggggtgggctctgagaggtgcgggcctggctgtccctagatctcttagaaatgagcggtggccggaagagtccaagcaaataaggggtggaggctgggagtcaggatgggcaggtatagaagtgatgctcctgggctgagcactgttttctcagagaggagctgagaagtgggaaaacctttgctaaataaggcggggcctatcccctcagccacccctgaggatttgggaggatgtgagagtcaaagagctgatcttccgctggatagttcccacctgggagagctggacggccgcccggctcaacacctaaaaggtgattgtggatggggcagggcctgacttggctgtcctcccacagtgcgacccctgtggcctgcatttccggcacaagagtcaactgcggctgcatctgcgccagaaacacggagctgctaccaacaccaaagtgcactaccacattctcggggggccctagctgagcgcaggcccaggccccacttgcttcctgcgggtgggaaagctgcaggcccaggccttgcttccctatcaggcttgggcataggggtgtgccaggccactttggtatcagaaattgccaccctcttaatttctcactggggagagcaggggtggcagatcctggctagatctgcctctgttttgctggtcaaaacctcttccccacaagccagattgtttctgaggagagagctagctaggggctgggaaaggggagagattggagtcctggtctccctaagggaatagccctccacctgtggcccccattgcattcagtttatctgtaaatataatttattgaggcctttgggtggcaccggggccttcattcgattgcatttcccactcccctcttccacaagtgtgattaaaagtgaccagaaacacagaaggtgagatcacagctctgctggcagagattactagcccttggctctctcgtttggcttgggtattttatattatttctgtcataacttttatctttagaattgttctttctcctgtttgtttgcttgttagtttgtttaaaatggaaaaaggggttctctgtgttctgcccctgtaattctaggtctggaacctttatttgttctagggcagctctgggaacatgcgggattgtggaattgggtcaggaaccctctctggtattctggatgttgtaggttctctagcagtctagaaatggatacagacatttctctgttcttcaagggtgataggaaccattatgttgagcccaaaatggaagtaataataaatgcctcctggaggctgtgggtgtgggggattctgtatctggattccgtatcactccaagtggaggctggcaggtttttctgcaagatggtccagaatctaaaatgtcccattaatctggtcacttgggtttggctctgctgtatccatctatagtggtagagacccaccagggctcaagtggagtccatcatcctcccacgggggcctgttcttagcactgagttgatcgctccatgggggagagatcagacattccttatcagagatgatgtgaccttttctgactctgcccagtctctatgaatgttatggcctagggaagaatcatgaaactctttagcttgattagatggtaaacagtgttaacccatcctttactacagaggcatatgggtttgaatgttacctggggttctctctattgagttgagccccttcttcctttagtgggttttggacatcttctggcaagtgtccagatgccagaaccttcttttcctctagaagggatggtgcttggtaaccttaccttttaaaagctgggtctgtgacctggtcttcccatccctgcattcctgtctggaaccagtgaatgcattagaaccttccataggaaaagaaaaggggctgagttccattctgggtttgctgtagtttggttgggattattgttggcattacagatgtaaaagattgactagcccataggccaaaggcctgttctagttgaccaagtttcaagtaggattaagaggttggttgaggggtgcagtttctggtgtaggccaggtaggtagaaagtgaggaacagggttgcctcttggctgggtggagtctctgaaatgttagaagaagcgctgaagccttgattgatagttctgccccttgttgccctggggcttatctgattatgggacgagggtagaaagtaagaagcacttttgaatttgtggggtagaacttcaacaataagtcagttctagtggctgtcgcctggggactagtgagaaagctactcttctccctcttccctctttctccccatggccccactgcagaattaaagaaggaagaagggaaggcggaggagtctataagaaggaatcatgatttctatttagcagattggatgggcaggtggagaatgcctgggggtagaaatgttagatcttgcaacatcagatccttggaataaagaagcctctctgtgctg

SEQ ID NO: 446 - DNA, 53313 bp, Homo sapiens
  source 1..53313: mol_type = genomic DNA; note = NC_000012.12:c84912803-84859491 SLC6A15 [organism=Homo sapiens] [GeneID=55117] [chromosome=12]
acacatacgcatgtacacgcgcacccgcacccgcgcgcctgtatcccgtgctgtttccctggcagacacacaggcgctcacgagtctctccttgccagcctgcagggcggcgacccccaaaacccagctccgggtcccaacctaggcaagaagctgcttctctgccaacagctcctcttcggcctccgtcacagccacctggaccctaccctttcgcgactgctgctgctgctgcccggacgtggaagcagcaagaggcgcttggtcaagacacactgacggtaatggcaagcgcctacgctaagggcacaactgggggtgaggtggggctcgccattagccacccaggagcctgggcaccagcaccgggaacgaattgatggatggatgccgggaaggactcgctgcgtcctggggtgggaggagggagggcagctcaaaagccctgggagggagaagctgggctgggcgggcaaccgtctaactctgcatctctgtacaatcagggtggggggcgacaggctgcacatgtaaggggaagcacatgggttgaaacgtgccgccatcctttcttcccgtcgtggaaattgcccacagcatccccagagacctactcgtttccaagccaagtcggggttggttgaagggtggggtccaacacgggaaagtccaagaggaaagttgggagggttggggcagagagagacgcgaggtgaattggaagctaaacctcgtgcaggtgggcgatggggcggggagagcagagagctttattcctcattcgcttccgttcgctttagcaaaggcagaaggcgactaccgaggacagagtgttttcacgtgaccacagttcccctttgcttgaggtatcctgtgataaatggcccgaaagggggcctttcgccgtacgaaaggcacgtggctgctggagaaatcacggctcctgtgtttctgcgcatcctggaatttgagagtgtggcggtgagggtggtgctgctgggactgtaagaagatgggaagcagttagaaacccagatcgtttctacctttctttcactaggctggtctgtgtgtgactgggaagaagacggtattgagtacagggaaatccttgcactctaacgtagcgcaccaactggatacataagaatgaatcaagacgcccgaggcgttcgggaacaggcatgacccacccagtggcacaggctgcgggaacgggaattatttttcctgagctgagaagcagcctttgatgtgcgttttaggaagcaaagcccccaggctcgcgctctccagcgtcccgctttccctttccatcctcctccctagctgggaaaggctggagtaagacggggcggggtccggactccggcgcagtgacgtaagcagtgtttgggtgcttatgcaaataagtctgcgacggtttcttctggtcttgccgttttcccctccagatcttataggtagacccaatcttagtctgcaccatccttgcggttcactacttaagacgtatgggagaaatgaaggatttgctttatatgctgctttggggctcctcatcgcccatgctgtaaaagctattttctacctgtcaatgcctgattgcttttctgctgtgccagcaacaaagtgtttgttttgaggaattattatgtgcagacacagccccaacaagcccctcacccacccaacctcatttctgcaagatcattgctgaaacacagacctatttatgtcttaggcgcccagtactgggcttgacttgtacgttcttaataaatacttaatgatggactaaatcttctttgaacagtgttaggttttgaagggaaggcgagggttaaagacacacacacacacacacacacacacggaaagagggcggctcaacagcaaattcaggctttctgtccagcataaatcctacagaagtggaggaccagcctaatgccggagcccgctgccgcttacaggctggggccatttataggtacgggcagaaggggtctgagcagtatggcttgctgctccgcgggatattaataagatgcttccatgaagaggcggttctggctcttgttccggcgcgatgtcgttctgttgttcagggtgttccttggacctttgtccagcaagatatgatagggatgtctctttagttaggcctttgtccaactcgtggtcagttggttagacgggatgtttctcacagctcgaacccctgtgaaatgtttcgctttcaccaaggtctgcaaaatagcagggagcttacaacatggtgcagtttggactaacaaacagtatgtatttttttctctcatattaaattcaagatatttgaccatcaaaatcaggcgattttatttttatgtgttgttgccttttctatggaatcatcaatgatccatgtgtatttgttgtggtaaaacatatcccaacaaatttaaaatggaatttattaaccatttttctctaaataaagctttcagtttgtgtttttttttaggatgacaggaattaataggatttttaaagaaagataatcttttactgttgataagcttttcttttttctgattgcacattatatagttgattgaaaaattattttataattctaatatagttaactcgagatgtagtattttaatcgaattaagaaagttatttttatatgtttctaggagatcagtactctatcactgaataaatatgaaataatgcagaatcttaaaactggataacagttatgagagatgccaataatcagatgagatgccttccttgtcacctactgaaacatttaaaataagtcagaatagttactaaactctaaagtccgtattcatagttactaccttacccagtgatcatagttgaaattgtaaatatgcttctcttgtcataaaatataatttgtatatgaataggtaagatatttgcattctttttaactctgggattatatcatctaggaaattgaatcattgacttagaatagcagacccaaaagagagcttggtggctatcaaaagctcctaaaaacttttctttcacttctcaatggacctctcaccttgtggaagagtatgttaattctttattactacatacatatgcatgataggatatattagtatattcttatgcagctgtgcagagtagattttgaaatggtttctcagcagatagtattaataaaaatctacaggcatagttggatgcatgaacaacattcaaggttacatagcaggaatcattagatttatttctactttgcttatcataccactcttctggctgtctttactaaacaatttttgatgtatttatctgcttaaatattaactttgaccagtaatgatcatctctttttctgtgaacaacaagccctaaaaataaactgggatatagggcaatttcaaatgcagagtatcacttgacacagggcagagctgtaagttgtgttcagccttgaaggtcactttatttccttgtgattaatgtgctaaggtatcttttcacataagatgaattgacttttatttttaaatagaatgcatactttgggaactttttcacctatcagattggcaaagatcaaagagattatttgttatacagaagacagtagaagaaagcgggcactctcatgcattgctggtggtagtgcaaatggacacaatttttatcaagggctatttggtaatatttatcaaaattataaaagctcataccttttgatcaagctgttccagttctaggaatttattctacagatatggagatgcaagatatacaaaataatttgttggaacattgtagtagcaaattatcagtgatgatctaaatatatggtataccataccaaggaatatcatacagtagttttttaaatgaagctattacattgagatcaagagttttgaagaatttattagagtgaaaaactaagaggtagaattatgcacatagtaatagttgtgtaaaaagaagcagattgggggctggtggggagaaaacacatattagcttgaatatatatagagtgtttaagtgtgtatacacacatatatatatgcttgaatatacagaaaatatttattgaagattttggttacttattgggaggtacagatggtacagtatattctagggagaaagggtaggaagatatatatatatatatatatatatatgtttctttactctttgccctttaatatcttattacagtattttgtattcaaaatataaatatataaaatattttaaagtaaagacagaggcaaataaacacctttggtagagttttattcattcatcacatgccatggaattagtaaggtacaaaagtcaatgagtattttgacgaccccctgatttttgttgttgtttctgaatttacaagaaagcttcctctttcaagagttttagaaataaaattatattggagaagcatatttagtacttgattcaataaagttatttaattatactagcaaaaaaggcataattttagggtattaaaaaaagtcttaattttgagatgggtgttgagtcccatgtagttggtaagaaataacacagagagttcttgtgagctcttgacaaatttcctgcaaatataacattttgtaataactatattaaaccttcctaatcagaatattgacattgatacagttaagttacaaaagagttccattacataaggattaactgtgttggccttttataaccacaaccacttcactccagtccccaggctctccttaactcctggcaatctctactctgttctccatatttattttttggtcattgcaagaatattatataaatgtaatcatacagtattcaatgtatttgaattgatgttttttcactcagcataattttctgtagattcatctaagtcatgtatattggtagtttttgctaaatagtagttaatggtatggatgtgccagaatttataactatttacccattgaatgacatctggattatttctagtttagggttaatgtaaataaaactgctatggacattcctgcataggcttttctggaacataaattttcatttatctgggataaatgagaacacttgctcggttatgtggtagcagtgtgtttagtttttaaatgaacagtcgaacttttccagagtgtttgtacaattttacattctcaccagtaatgaataaatgatccattttctctgcatccttgccagaatttggttgtcactatattttggccattctgataggaatatagcaacatctcatagtattttatatttgcatttacctaatggctaataatatcgagcctcagttcttgtgcttctttgtcattcatatataatattcattgaaatatctctacctgttttcttattttatttataatggtcgagtttttttttgttttttgttttttttcgagacggagtctccctctgtggcccaggctggagttcagtggcgcgatctcagctcactgcaagctctgcctccctggttcacaccattctcctgcctcagcctcccaagtagcttggactacaggtacccgccaccacgcccggctaatttttgtatttttagtatagacagggtttcaccgtgttagccaggatggtctcaatctcctgacctcatgatccacccgtctgggcctcccaaagtgctgggattacaggcgtgagccaccgcgcctggcaacggtcgagttttaagagttctttatatatcctaaacaccagtcatttgtgaccttcaaatatattctcccatttttaagcttttttttttccatcctcttaatagattctttctcatagcaaaagtttcaaattttggggcctagtttatcaatttttgtgtttctgaatcctgcttttgtcatgtctaagagctctttggttaaccctagatctcaaagatttaatctgatgacttgtttcttaaagttttatattttccacttaagtttgtaattcattttgaattaatttttgtataagatatgagatttaggttcagggttatacttttgcctagggatgtccaattatttcccgaacaatttgttgaaagagctatttttttctccattgaaattgctttggtacttttatcaaaaattagttaggcatattgtgtgcacttctttctgggtagcctcttctgttacattcatttttgtctatcctttcaccaacctcacatagacttcattactgtagctatataataagtcacaaaattcgatagaatcattcctcccacttcattcttctgtttaaaattgttgtagctcctctaattttttgcctgttcatataaattttgaaataatcttctttgtagaaaaatgtcactgatattttgataggaattcatttaaccatatatcaatttagggaaatttgacatctttcttatgttgagttttctaatccatgaacatggcatgtcttcccatacatttagatcttctttcatttactttatcagcactttgtagttttcagcaaaaatgtaccatccaggttttgttacattttcgtgtaattatgtcagtttaatgattgtaaatgctattgcatttttaatttctgtgttcacttgtttattggtaacatatggaactgtaaatgatttgtgtatgtttaccgtgtattctgtgacttttttggactattactctagaaggtatttttgtagattcattagaatttataatatagacaatcaaaatatctgcaaaaaaattgaatactgtattattacattcatataacattcttgaaatgaccaaaaaataagtatggagaacagattagaggttgccaggagttaaggagagcctggggactggagcacagtggttgtagttaaaaaaggccaacacagggaatccttatgtgatggaaatcttttgtaacttggctgttcttctttcttgatttatgtgacttatacataaatttgtaacttgacttttcttgtttcttgatttatgtgacttatacagttaggcttctgtgtccttaggttgtgcatccacagattcaaccaaatgcagatgtgaatatagtacttgtgggatgcaggacccacagatgaatgtgggacttgagcatctgagaattttggtatttgtgggaggtccttcaacaatgtcccttggacactaagggctgactgtattttctttttcttgccttatgccactacttagaacttccaatactatgttgaataagagtgtgagagtggacgtttttatcttgcttcttatcctgaaggaaaagcatttagtctttcaccagtaaatataatatcaactgtaaattttttgtagatgctgttgatcaagttgagaaagtttccttctgttcctaatttttgacatttttgatcataaatggacattgaattttgtctttcctgcatcagtagatatagtcatgtgatttttcctttagcctgtcattattgtatatcacatattgatttttgaatattgaaccaaccttgaatacttagaataaaccctacttgatcatggaatataattctttttatacatcactgaattctgttttctaacactgtgtaaaggaattttgtgtctatattcattaggaatattgatctgtagttttttattttttactatgatctttgcctggttttggtacctgagtaatactgctttcataaaatgaaatacaaattattctatcatcttctattgcctgaagagattgtgtagaattgatgttaattcttctttaaatgtttggtggaattttccagtgagatttcttttgtgacagttttaaaattatgcattcaacttatttattagttatatagctattaaatgttctatttcttattggctaagttgtggtagtttgtgttttttaaggaactgattggttacacctcagttactaaatttatgtgtgtagagtttttgttagtattctctcatggtcattttgatgtctgcagattttgcaatgataattcctgtttcacttacgatatccaagatgccttaagcatgaaattgactttatgcagctttacatatgattgactaaatgtggctttgaaagttaatacctatttctattctaatacctatgaaatcactgtgtgtatttaaaaacctaaaccacatatcctctacatagatctagccacattgtgaacaggttattggacaatattttaaatttcagtacagtttgtataattttagttaaatccaatacataagtaatcttatccatagacaaatgtttcagatatctattgctacacaacaaaccattctacaacatagtgtcttaaaataatgactttttaaaatcattcttctgtggggtggttgggctcatttgggtggttcatttgctctaattggtgtgttacctggctgttcagctagggctggaatatcaatacctttgttcttatgcctggagcttcacttcagatgatggttgcttgagactatttctctctctctctctctctctctctccccctccgcccctcccccctttctctccctttctctccctctttccatgtggggtttctagcaggagaagcagacgttttacatggtgcctagcttccaaaagagggaaagcagaaactgccaagcttctatagccttggaacttgcatagtttcactgctgctaccttctggtcaaagcaaaccaaagttaacccagatttaaaagaagggaaaacagcctactacaacaaataactataaaagatcaaacaacattgtataaggatgtatgaacaaataaaacatattcagtgcctttaaattaatatttttagaaaacatagtataaattagtttaaataatagtatatgcctcctaaagatgtgtccagttcctacttcctgacatctataaatgttacctaatttggaagaaaagtctttgcagatatagtattgagatgaagatatgatttcggaagatccagatgggccctacatgccatgacaagcatccttataggaaagatggagagggatgttagactgaagtagaaggaagtaggcaatctgactacagaaacagagaatggagtaatgaggccacaaattgaggaatgccagcagccaccagaaactggagaaggcaaggttcatgttctcccctagagcctcccgagaaaataccaccctggtaacgccttgattttggttgactgtaacttaatttggattctttggtctccggaagtatgaaagaatacatttctgttgttttaagacattaaatttgaagtaattttttttattctcaatgttttttagggcatattagtatattttattttattttttgttatactttaagttttagggtacatgtgcacaatgtgcaggtttgttacatatgtatacatgtgccatgttggtgtgctgcacccattaactcgtcacttacatgaggtataccttacgttaataaaactttgtcttaaaaactttttgtctacttcagaaatctctaaaagaattttgaaagattgtctatctttgattcacagaagtcaacaaaaatatactccaatttatggaaattgctttatgattataattaattttgaaataattacgatttcacagaagggtgcacatggaggtgtatgcaccatttactcgacttccccaccactaacatcttatgtcagatacggtactatataaaaaccagcatattgatgctggtataatccatagtatgtccacgtttatagctctgtgaaattttataaaatgtataccttcttctatcccttaccacaatgaagatagtaacctgtgtgccttaccatatgattctctcctgctactcttttataagcacacccatttaccctctccatccctaactcttcaaaccatgaatatgttgtttatttctataattatgttatttcacaaatgttatataaaaattgttatatatgtatttctttgaaattggcatttttatattgttttcactgagtatcatttcctttaggtacatgcaagttgttgcatgtatcaatagttcttttttactgctgagtagtggttcatggtgcgaatgtagcacagtttaaccattcacccattgaaacgcatactggatagtttccattttttttctattataagtaaagctgctatggacatttgtgtacaagttttgtaagtttttttttatttttctgtgatatatctctgaaatatagttgctggttactatgagaagtctttattagtgttaaaagtaaccaagttgtttttcagagtggctgtaccattttacatttccaccagcaacatgtgattgatttagtttctacatgtcctcaccaatatttggtgttattaatttaaaaaacaaagtttagccattctgataggtgtgttatttgtagcccaccttttgggaaaaaaaatatacatttaatgaagtataaatagtgacttggtattgttatttgtaaaaaaagttcccttccttttgattggctctgtaattttttatttgatagctcagtgcaaaaattttatgtaaaccaggatacaatttgcaaaatacatttcaatttattgaattctatattgttaaaaatatttcatattattcatcaagattattatttcagtatttcatgaaatctcttgatgaaaatatttttcctctataattataccataactataaactaattggcatacggtgacaatttttcttgagcattacagtatggtccaaattttgattttatttggatggtctttatttttgtcctatattagaaaatagaaaaatgaatttcatttgaatctataaataattaaacatttcatattcaaattagtttgtatttaaataaaacttttttttcagtgaaattttaagttgtcaaagacagggagataatttactagtgttctagtgctttattatagaatactaagcttgtgacaaatgccaaaaattagccagtgcagatatatatgtttgagtcatccatcatatatgtcagatgcagacacctacctgctacttcaagtgtttgcatattttcactggaaatgttaattaaaatttaatataatttcaaaagagattgtaacaatggcttggaaggtagaaaattttgaaggatggaacaagaatggcagaaagtattgagttaattttttagtgaacatattatagcaagactggtcaagataaaaacaaagaaaaagacctattaccaatatcagtaataaagataagatatgatgacgaattctatatgtgtttaaaaaactgtggaatattatagaacactttagggcaatgagtttggcaccttacataaaatggacaaatccttcaaaaagatggcttaccaaaagtaaaacaagaaaaggaaaatcttagtagctgtatatcaatgaaatgaattgaatttttaatttaaaacattttcagaaagaaaaccccaagcccagatggctttattggcgagtgctgccaaacttttaaagaagaatgaaactaattctacacatgtactctcagaaaataaaagataaatcatttcaaagctttctaagacaccaccaaaaccagagaagcaaaatacattatatatatatatacacacacacacatatacgtatacatatatacgtatatgtgtatgcatatatacatgtatatatgtatgtatatatatacatatctatacacatatatacatgtatatatgtatgtatatatatacatatctatacacatatatacatgtatatatgtatgtatatatatacatatctatacacatatatacacccactttcctatgaatgtagttgaaagaaaatctataacaaaatatagcagatttattttagtgatatattaaaaagtaattcatcttgaccaagtgaggtttatttcataaatgaaagattgttttaagatagaaaagcaacgaatgtgatactccatatgaatagatgaagaactgatatggttatcttaataaaggcaaaaataatttgtcaaaatttaacacagtaattcaaactaatgacctcactgaactaggaatataaagtaacttctctaaactaataaagggatctatgaaaacaatgtccaattaacattgaacgtaggggaatattgactacaaataacaccgagacataaatgaagatgtttgcctttagcatttctagtcaatgttttggtggatgtcttagccagtaaaataagtcaagagaaagatataaaagtaaataattataaaaatgaaagttaaattatcattattgactgatgacatgattatgtaagtggaggtccctcgggatcttagaaagatgcaaaacttgatttagcatctttgtgggcagaaacctatattaaaaatcagttatattgcatatactagcaaaatataattgaaacctaagaaaagaatttgcaatcataccccaaacacacattaatcagaaataaatttaacaaaagttgtgcaagaccaatacactgaaatctctgaaacactgttgagagaaattaaagacatgaaataaataaaaagatacaccaagtttatagcctggaaaactcaatttggtagatatcagtgttccccaaatagatcaatgaaatcaatgtaattcaattttaaatcctagtaggctgggttttttgtggtagaaattgtcaagctgatttcaaaaattatgtggaaataaaagaacctagaataggtgaaacaatcttgaaaaagaacacaaaaagtaaaatggttggggttaagaaccactgagttggaaatttattatcatgattttaaaaattttggatctacttttaagtgcttcaaaatagatttattttgaaaaatatatgaagataactaaagcgatacaaaaaatgagagattgagaaagaggtaaatataagttcaaatttaaatactgtaaagttcccaacatatttgtgtatttatgttcatatacatagatagatgaatggaaatatagcagtagtttttgattcataatttgtaagccatttggggttctttgcaagctttagaaagtgatgctggataagaggcaaagaaaagtaatattggcagtcacaggagctcaaagaaacaatgggatgcttggcaatgaaatggaaaaaggaaagaatgaaaatagttctgaaaactaggaaccaatgtccatgactacggtagtatttacagcctgggcataatgcctttgatggaattggatgacatgcctacttttttatcactttgtgcctctcctcaagattaaaactccagggaggtggaaactaagcaaatgctgaattttttcaaagatagtggcagtatttttttttcctttctacgcatgccttttgcagtagggttttttgtcccttccatcaaaaagtaaggtttatctctactcttgaatcagtatggacttaggtttgagactttctttggtcaatgaggcattagccaatgtgaaatagagagaggctctagtagcacttgtacattgggctcaccttttctttttggctacagttggaaatctgagctacaatatgaacaagttgcagctagtattttggagagattacttataagcaaaccaaagtgctccagctgacagcctgacttttgctagaatgtcagttagaccatattagaacaccttcttggaactgacagatcactgcagtgcaggaccgaattcaagaacaactgatcatgtaagcctagttcacactgctaattcagagaatcatgaaagaattaaattgtttttcaaagccactaaatataaaggagatttgatgtgcagccatggataactgagacaaacaaaaagttgtgttaaggagaaaattaaacatgcagcattggctctggacctaacattgtccttaatattacagaagcatctacaacaaatcagttatattatagtcttagtgttgtgataatcatagtaataaaagagagaatatattgagtcctctcagtgtgctgacattgacttatgtactttatcagtagataagtatattattgttctcattttataaatgaagaaactgaagcacagtttaataacttggccagggtcataaaatcataagtgacagagttacaatttgaactcagatagtctctttctaaaatctatgtataaatatttgggaccaatacatgtcttttcacatcaaaacgtattgattcttataatgtcacattacaatcaaataagaaagattatatgaaaacctgaagagcttgaggtcattatcctcttttatataataagttgttttttgtttgtttgtttgttttttaagacagatctcactctgtcacccaggctggagtgcagtggtacaatctcagctcactgcaacatccacctcctggctcaagtgattcttgtgcctcagccaaccaagtagctgggactaaaggtgcatgccaccaggcctggctaatttttgtagtttttggtagagatggggtttcaccatgttggccaggctggtcttgaactcctggcatcaagtgatctgcccatctcagcctcccagtgctgggattataggcatgagccactgtgcccaaccaagtcatatttacacagtatctattacttcctacatgaaagatgagcatattttcacacttttatttctttttctcctctcatttcaatttttgattttttttggtaatttaattcacaattgtcccctgcacataatttctataaaaagtaaaccatatttccttgtttaaattaatgttcacttctattcttcaacatggctcctctttactaagatcttttactttgttttctctgtttggctaaattttatgattatgtagtctttccctccataccccactccttcatcccatagggctcatcatttctcttatgcttaggaatatttgcctgtggcttttataatcggaatacaaattaattgggtataaaattggagatcatatatttttctcttagttttattgaaattaatgaatattatgagaagtgttttaatttcatctattaatagatattatgagaagtgttttaatttgatctttctacttctgcttgaaatccctaggaattcttatcttggtaatttatcagtgtttactcttctgtattgttattatttgcaaatacaagtcttcaagcaaaacctctgcttttcttttagtattttgtgttttattaattgtattattgtgtttggctataccaattagaagtttgttggattacctttagctgacttcagttttcattagctttcttctaaattactttaagatatttgtaacttttcatttcttttttgtgaactttctttacatctgtcctccatgcctcagatatagtttcagtagtgtttattctagtttctgttgtttctttttctttattttattttattttatttattttatttgagacacggtcttgctccgtcactcaggctggaatgcagtggtatgatctctgcaaccgctgcctgcaaactctgcctccccagttcaaatgattctcctgccccagcctcctgagtatctgggattacaggcacctgccaccacacccagctaatttttgtatttttttaggggagagggaatttcaccatattggccagtatggcctcgaactcctggcctcaagtgatccacccgcctagtgctcccaaagtgctgggtttacaggcgtgagccaccacacctggccttcagttgcttctaatgtgacttttagtcctctgatgaattctcccatttcttgtgttcatccacttacctttttctttcagttaatcttttagttcacttccatgaaatttattttaaataaatgttttctttgtaactctgaagcacattgtttcctggtgtatatttatattctgtatatgtcttttgcttatgtttcttcctgtgtccactatcacctctatctttccatttccatacacatatttttcattatttggaactacgcattttcaatagggaaatttctatattggaatattttttgacatgggaagtagtgccatacaaattgagtgagctggggaactccacattttcaatttagatttattctctgaaagagaggttggcaaatgttttcagtgaagagttagtaaacattttaggctttacggtccataacaataactctgttgttgtagcacaaaatcagccataacaaaatgtaaatctacgggcatggatacgtgccaacacaatcttttttttttttacaaaatacagatggtgggttgtatttggtccatgagcaatattttatgggcatggatacatgccaatacaatcttttttacaaaatacagatggtgggttgtatttggcccatgagcaatattttgttgactcctgctctattgtacagttgtagacaggaggctcttaccaaataatgatgaggacaagtattacaactcttcggtgcagatgaagtgcagtgagtgatagcttgttccttagttgattgtctatcacaagaatggatgctgctaagttggcagagattgtgctgttacttgatactgattccactactgtccatatgacctatcgagcactgatactttatcactctatctctcttcctggacatttctcttcatttcttcttctattctcagatgtaacaattgtaatacatttttggcaattgccaacctctcttttgattttcttttttgtctatgtttatggactacatttatggactaagtttttaggcgggcttttagaatttataaaaatggttatccttcaagaaagttactcttaaaaatgtgaaattgatctggcttctaaattattgttgctatacttagttttaataaatctcttcagaaactaaatttatctatttacttttggctgtatgaaaactgtgcacaagaagtcaattcttatgttcagtgggtgcatggtcttaaagtaaaaatacaaacaaactggtcatggtggctcacgcttgtaatcctagcactttgggaggccgaggtgggtggatcacgaggtcaggagttcaagaccagcctgaccaagaaggtgaaacctcgtctctactaaaaatacaaaaattagccgggcatggggacgggtgcctgtaatcccagctacccaagaggctgaggcagagaattgcttgaactcgggaggcagaggttgtggtgagccgagatcatgccactgcactccagcctgggggacagagtgagactccatctcaaaaaaaaaaaaaaaaaaaaaaaaaaaatacaaacaaaaatgaaaacatctaagtgcaaaatacttgtttagttatatgatcttattctttaaacctttcggttcattcattcaacagacaagtttaaacattggtaatatgggggtgagtaagataaacaatgtcattctcaaggcaataacttattttctcccagacttacatgttattgtgaatattttaatgttaattacaattcttcccctatcttcctacaaccaccccagacagaccaagaagtgggacagggtaagaaaaatagtaagaaaagagagcttagataattttatttataatatcattaaggattcattatagttttttgctcatatgagaaaaggagcttttaatgcatgcaaatacccacttcaactccctttttaataagtattttattttataaagtttggctagagttgttatacgatatctgtagtatatatttatttatattcaaagtgtttatgatataatattacatttaaaatttgtttacattagatactgattttttaaaatagaaaatatgaccttcaggtagtttgatcagaatatttgagtgtaaactttgccaaaggataacttatgtaaattggtgaggattattcacttggtgtgtaaaaaacatgcagtagtagccaaaggtattaccttttattttgatttttgtgtgtgtattttttgtccaaagaatataaatgtatagaagagatatagtattttccgtaaaaatttgggggagattcatggttcacactatttaaaattttttttctttgtaaaatgttgagtgtttttactataatagtatctctaagcttggatacactccttacttttctgtctgtatggaaaaagcaaaaggaataagaaaccaaagtttattgtgggaactgaggttaagagaggcataactatcagcatttacacaattaataagttatagtgctaggacacaactccaaatttgtcagactaaaatccatgctcttatccatatatcacttgctactatgccaacacattttatcttcagataatttaataaatgtaaatcttttttctggataattcatgtcttacaaatcacaattttttatatgtcaggttgttttcttccagcaaataccatctagaaatttgtttatttcagtttttcaatggctatatttattaatgtattcaactaatatttactgagctgtaggggaaaataatataaattaaacagacaaaatgtcaaacctcatgaattatttccatatcaaaactttgttggcctctgtgaaatagtcactgtgatcgcttctcggcctttttgctaagatcaagtgtagtatctgttcttatcagtttaaaataatcactgtgggaagttttacacctattctggagatgtgtctatcactcaaaatattttgggaatgcatctctttcacaattttctaaacagttttctcttaatcttcaccaaatcctaaacgagaagtgtttgctcttagggtatatattttaattttaaaacaactaaacatcatcccaacctaaaggcaacaaattagttacatagtaagttaagtaattttttttccactgggttacccaacactttgtcttgctcattaagattatagattgaaatatgatagctgttttctttgacttttaatgtcaatctaatagcagttctcttaataaattctattttattccagaaatgaagggcggaattcttgggctaccatttcataaacttcctaattcagatttgaagagaagcagtcatatttttcagtcacattttaacatagtgtcgctggactgtagacatgtcttatatatttacttggtctgtgtctgagtggggaaaaggataggagacgtaacatacaaataaagaaaggaaaaaaaaaatcccaaagggattacagtgtttttcctgagctgttaagagactgatcacatatataatgtacattttgagcatttcttgtctcatttatacttttccttatgattgggtatgacctcactccatttatgctcaactctaattttatccaacattcctgatctttcctgttgtaataatgttgggtcatttaaattctgcactacagaattgttatttgatgtacctttctctctattaaatataagatccttaaaaacatgctttgtacgtttcattgattattgtatcccataaagcctcatcacaataaatatcaaatgggttgggtgagatcacttatgcaatataatcccagcactttgggaggccaaggcgggatcccttgaacccagaagttcgagatctgcctaggcaacatagtgagacttcatctctacaaagaaaagaaaaataaaattagctgggtgtggtggtacacacctgtagtcccagctacttctgggactgaggcaagaggatctctgggagaggtacaggctgcagtgagtcctgattttgccacagcactccagcctgggtgacagagtgggaccctgtctccaaaaataaaataaaataaactaggttaaatttttgagaagaacaattaatatcaaatgagtgaatgacgaatgtttgaacagaagagattatatatgagacaaatttacagcgttggtttgcaattgtgtttataattccacaaggaacaaaatcagggatatataagaaaatatctgctttagtcagggaggaaaaaataaagaattaagaaaaagagtcctaaaagtttagttactaatgaacagaatattcattatgcattggagtgtatctgagatttttgcaagaaggaggatgttagctaagaaaattgtatttgaagctcataagtgctttaaaattcttatacttacgggaatattaagctctgaaatgctaaagacagttacatgttttatactctgtagaaagggtttctatcataaaaataaaaaagaataattctgtatttaaattttttcatcattaaatatgatcacatttcaacttataattttacaggtacctacagaatactggacatacggattcagaatccataaggctttatcaccttgaatcaaggatttatttgatatcatcctcggtctttacttcctatcaagtaacattgttttgaaaaatagagttaacacatttgccataagggagtttttttttttttttttaaatacttcgcatactctccaatgcccaaaaatagcaaggtggtaaaaagagaattagatgatgatgttactgagtctgtcaaagaccttctttccaatgaagacgcagctgatgatgcttttaagacaagtgaactaattgttgatggccaggaagagaaagatacagatgttgaagaaggatctgaagtcgaagatgaaagaccagcttggaacagtaaactacaatacatcctggcccaagttggattttctgtaggtttaggaaatgtgtggcgatttccatacctatgtcagaagaatgggggcggtaagtaatctttttaagtgataaattactgtagtaaattgcaattgggtttctcaaatagctcctattattgctgtttctcattatttttgaaactttcaatttcattgtaaagctagagaaacccacttctttgtgggaagtgagcccagatatgttttcagattacgtttccacaggagcagatgggcttgctgtgaatgctcagggattgcttaagggtaacacattctcaacttctttctccggaagcttattaaacaactctgaataactgagtgaaacttttcttgcatcgtttgtgcttgtaaattattccctttgaagaataacctaaagcttctgatatatgacaatactggtgaaggaaaacagagaattttctctccgtgatttattaattcttaattttaagttgcctcattcttcaaaaaatacaaaatgatatgtaacttagaataattataatcttcaaatgctgatgagaacatttagatcccagcagaaggaatgtaaacagataatacaatgctagacattcttcattcttaggcattttatgcatttcctttccagttctatgggggtattttggaacaatgttccatttcaaagacaactttaaagaaattagcaaccttaattttaaacaaaattatctgcaacatcattgctattcttgctattaatatttacatttgtacttataaaggcttacttagcaaaattatcttagaagtctagggaaaaaactttacaaaggggaaaattgtttacatatgatgctaattctatagtacaccaaaaccaaactgaatttaatttaactaacattggattgaaatgttattatctatgtatatgaaatattattatttatgtacacgtacatgctgttaaaataagtgtggctgaaaataaaatattccataagtcatgcatttcaggacacaaagtatataaagaatattttggtatttgattctagtttgtgataattttattgactggacaaaaatatggtttatttttaatgtggttgtaatctacaaaccctacatcaaataaaataataaaacccatgcgtatgtaaattttttcctggccactgaaacatgaaactctaagatgttatggtgacaaaatatgtttaagatatcttttagttaattcaaacaggcacaaaacaaaaggtttggaaaaagtagtccatttggcaaatctgccttagaggtaaagatcgaacgtagagtcagtgacgcactgtgcatccctatactgaaaatctccttagctagccagtaacctcacacatgaattatttattaaatcagctgtaagcaactatgtactatcctgctttttgtttctcacaaatcattccatttgccaagactagcagaatatcaattctggttttaagacttttttgccttgtaagtcgtattgaccacactattaaggaggatagctgatttggctgaaaagtcaggttgacttccatttagtacaatttctgtcttgctggagagtgctaaaagattttatatgtagtaattggttcttagcacaaatggctcctccttcttatttccatatattaaaaaagtcaaaatatcttttctagtattatttcttttctactaaatggaaatactagaaagcagtagtgtacatattataaaataccaaccgatttttcactttagaatggttgttacagtaccaaagattgtactcaccattcagtatggcattgagtcttctaattgttggaggaatatcttctgactaaacaaccagaagatagtcctctgcctcaggctatcaaaatcttattcatgaatcacttaagcactttttgagtaatagaaaaaaaaggtaatagagtcaatataaagtttatttgcctagtgatattatccttttaaaacacaatggttaggcgaagtaggtggtatagtatagagacttccagatcaggttttgaagtcaatttcactgtttgaagcctggttcttttacacactacccatgtgacctttcacaggctacctcatttgttcaggcttagtttccaccctgtaaaatagggttaataattttatctatctccaaggattcttataagggatacattaatagctacaggtaatgtgcttagaaatatggctggcaaatagtacatgttcaaatatatgtatttaaagcgtaacacatttattaaatcgtagtctttcatgacatgggaactttcagaaatgaagacccaaagactcagggaaaactgttttttttatttttatttttatttttatttttatttttatttttttctgagaccgagtcttgctcttttgcccagcctggagttcagtggcgcaatctctgtctgctcactgcaagctccgcctcccgggttcatgccattctcctgcctcagcctccggagtagctgggactgcaggcgcccgccaccgcgcccagctaattttttgtatttttggtagagacagggtttcaccgtgttagccaggatggtcttgatctcctgacctcatgatccgtctgcctcggcctcccaaagtgctgggactacaggcatgagccaccgcgcccaggcaactgtttttatgcttagattacctgaagtataggcagccatatagaaatgtgattggacaaaagggtagatctagtgagaatagactaaaggaagcaaacccagcaagtcctgtctgttcagatttttcttggcctctctgagtggcattccttcctcctggatatgaaacaggacgtctccggaatgaggatcttcaagggagaagggagaagatgacctttctaggttttgtggcttgctttggggaagaggcattctagtttctatgacccaccttgaggggaagaaatcttgtgtctgtgacttgcttcagggacaaaaaaagagtgggagacaggagtaaagaaaaaggccaggaagccttggcttccgaggtccttccaatttcctttagttcaaggtatccagcatgccaacgtgccacgcttaaaagaaaaattatttcaatagattttggagtagaagtggatttttgttacataaatgaattatatagtggtgaattcagagattttaatgtacccctcacccaagtagcatacattgtacataatatgtagttttttaaccgtatcccccatcccaattttccccttctgaatctctaaagtgcattacatcatactgtatgcctttgcatacttacagcctaactcctacttataaatgagaacataaagtttttggttttctactcctaagttatttcacttagaataatggcctccagctccattcaatttaatatgaagggcattattttgttcctttttatggctgagtagtattctgtggtgcataatatcaccttttctttatccactcattagtcgatgggcacttaggctggttccacatctttgcaattgtgaattgtactgctgtaaacatatgcatgtaagtgtcttttttttgtttttgtttttggcttttttttttttttcgacaaggtctcactctgtcaccgagactggagtgcagtggtgcgatctcagctcactgcaacctctccccatctctggactcaagagtcagtcttcccacctcagccttccgagtagctgggaccacaggcgcgcagcccacgctcagctgtttttttttttcctttgttttttgtattttattttatttttttagtagagacggggggcgtctcaccatgttgcccaagctggtctcgaactcctgaactcaagcgatctgccagcctcggcctcccaaagtgctgagattacaggcatgagccaccgtgcccagcctcaagtatctttttcatataataacttttcttcctttgggtagatatctaggagtgggcttgctggattgaatgtagatctactttcagttctttaagggttcttcatactgttttctatagaagaatttgagatagaagaaaagtctaagtatccaacagcatgtcacccacacatgactggaaaaaaatccctaatgagttcagtcataattctttctctctctcttttttcttactcattcacatgcgtataaaaaatccattcataatctaagatttgatgcagatgttaaaattcactttcagtctttgggaaaaacattcaggtcagcagttcctgaatgttactaatcattttagaattagaattttgttttctaagctcatgcatccaatttttacattgtatatgtagttttgttagaatcaactaagaatgaaagactgaaaatcagtcatagaaaggttcagattatgtagcaaccactatgtagggaaatgcctggatataatcattattacagagataaacagatgctgagataaataatttgaaaaaatccattatttcactgcttcagctgaatacagttactcactatgtatttgtgttccactaaatattccattaagacgattcgaatagcttcaaaaatctattcagtgccattaaacatatgataaatatgtaggaaatgtataataaaaggctctttatagaaaataggaattagttaccattgattgtaagaccattacatttaacagtatctagttggacaaaactgcagattaaaaaattgaatgtaagaagtttagctaagaggtcatttaataataatttgcacatgtagcctcatgtaggaacgacctccacaggctgaggtgggaagatcccttgagctgggtagtttgagaatgcagtgaacagtgatcacaccactgtacttcagcctgggtgacagagtgagagcctgtctccaaaaggaaagaaagacacaaagaaatgagtaaaggtttcacattcatctttttataattcagttaatagaatcttgtattaacattgtcaaactatttaggtaccttttgaaatcactagtcatagtcatatgtcttaatttgtgatttaactaaaaaatactttttaaaatatggaaattttattacaaggataataacatatacatttttacaatagatattaaatgttttaatttcttaatgactctcactaccttttctgataattttggaaaacaaaatctatttgtgtacttcttttatgtagtatttatgggaaaaatgacatttgtctctggtagaagttatgttgctgttttttttttttctttttcagtctaagcagacgtttcttcttccatgatgttattttatttggaaaaaaaagtcaacgttaatgccataaaatctcattcactctaatttttctgatttagaatgcattatttcaatgagtttgtataaattttaataaatgagttcataaacattgtgtgaataagatttctaggagtttgtgaaacctgccccagaaaagaatgaattttaaataatcaattatttttatggaaaatgaaactgttttactctttaaataaatttaagctaaagctattcattaatattcttaattttatcctaattattttattatcagaaactctttgtagaaatcaaattcaagtttcagaatctagaaagtgcaaagtaatgaaattgtgtcttcttcagagctctccataattgcactatatagtaattcaaatattatctttaatgggataaactgaactagtgtattttctactgtattgaaaatataatctattttttgttgttgtttctttaggtgcatatcttttaccatatttaatactacttatggtaataggtattcccctttttttcttggaactctctgtgggtcaaagaattcggcgaggcagcattggtgtatggaattacataagccctaaactgggcgggattggatttgcaagttgtgtagtaagtttccttttgttggtgtatgctgtaatctttatagggtttcaaattatataattaacatttaaatgaaactttggagtgtgtgttaataaacaactcttttactatgttttagaaaacgttactggcatatggattaactataaatattaatatagctcaatgttgttaatgcctgttctaagtcctgagaaagacattaactttttagaaaagataatgtgtcccaaataaataataaaatgaagaggattttaaaatgttaaataaaattttatgcatttgatctcattcttttaatggaagaggtatgagaggtttaatgggatatcattttattttgcaggtgtgctattttgtagctctctactacaacgtcatcattggctggagtttgttttatttttctcagtcttttcagcaacccctgccttgggatcagtgtcctttggtgaaaaatgcttcacacacttgtaagatatgtataatacagtgttttggtatttaagcattataagagtggcaaaggtacaagctttcaagatttttttctttttaaaataatgtagaaacatcattcaaaattatcattataacagactttgctcacattcaggattgacatactcttagagatagacttttgggaccatctaatttttttagctctttccaagttactttactatgccctaagatattagggtaaagtattataagccttcacttattaactttgataatctttattttgtatgccctgattgatgccttacattttcattaaaactaacagaaaggggacagaaataagaatttgaatgaaaatagttgcttttatgtctttggttctgttgtttcatacttttcccatcatttttttaaatcccataatataatataaatattataaagagcagtcacctatagtagtgatgtctagtaaacatagattgtaatgcacagatatagtttatatttttcaagtaaacatgtttaaagaaagtaaaaagaaatagatgaaatattttacttaatctattatataaaaatactatttcaatatataattactctaaacattattaatataataattcacaataattttcttatactgaatctgaaatctagttcaaatttcacatttgtaacccatgtcactttagattggccccatttctaaagcaacatgtggccagcagctagcatatttgacaatgcttacccagggagtcaatcccataattccaagggtagtaggggtgataaacctgatttgtttaaattactttgataaggggttgggtgcggtggctcactcctgtaatcccagcactttgggaggtcgaggcaggtagagcccctgaggtcaggagtttgagaacagtctggccaatgtggtgaaacaacatctctactaaaaatacaaaaattagctcggtttggtggcgggtgtctataatcccagctacttgggaggctgaggcaggagaatcacttgaatccgggaggcagaggttgcagtgagccgagatcgcaccattgcactccagcctgggcgacagagcaaaactcggtctcaaaaataaaaataaaataaaataaaaataaataaataaaaattactttgataagaggttcacatattcttactgcaggactgcataagaaatatttaacaggatacatttctgtttgttgcacagttgaatttttattgttcattgtgaatttacatgctgctatacaatggtagtacttttctaggaagcattaagaattcacttacaggtttattggaaaagaaattgtcgcattgctctttatattctgaaataattgtgtgttacttttctttctacagttgtagaaccagaatgtgaacaaagttctgccaccacctattactggtacagggaagcactgaatatttcaagttccatttctgaaagtgggggcttaaactggaagatgaccatctgcttgttggctgcctgggtcatggtttgcttggctatgatcaaaggcattcagtcttctggaaaagttagtatgttagagcccttcctcattctgctaatcaccatttctggattcatccctctctcaaattctgttacagatttctgtgggcaaatcacacataacacttcattctaggtagttaaatattagtgaaaagtgacacttcaaaagtgtgcttacatttttaaaaagacaaataaaaacagtgttttatagtgaaatctaaggttaattataatctttccttatttcaacaagatctttaaaatttttgtgaatacttaaaagtcctttctttttgccctttattcaattagtcctaatgtttcagttctctaattaccaattagttaaattatggaaattggggaaagtggtaaaatgagtaattcattcattttgtttgtttgatatcatttgtttctctctgctgtaggtgttctaaggaatagctgcataagacattttgaaataatgtaatgtgaagtgtttcttaaagctctgaacatcattaagtagttaataataattccaacaaggaattcagagtaatgtaaaagactaaatatcattccttctaaggcaaattgaaaattagaatggttgtggtttaaaaagacattaagtgaattctaggtagcttgtttgttattatttttaaaggacgctctaggaaagtaattgctattcactattttgctttcgtattactttttttttttttttttcattatcacagccattgttctaaagctctccacatctcttggctggatcatagcaagaatttactgttggctcttctctctgccgtttaactgtccagctgtgctattttccttttcaaagtataactgatttcaggctaacttattaccactcatcatcatatactagcaggaatggcaatagtagtagtagtagcagcagcaatagtagaagtagtcataataacaataataataaatgatgataaagatgtttctgacaagaattagggtaagaacagtaattgaagccaattatttattacaaatgtattttgctttgggtactgtgataactactttttatactttatcccatttaattataaaaaccactcttgagaagtaatttttattttcagaaccattttacagatttaaaataaacaggtttgaggaattagtttaacttatccaaagtttcgtggctattaagttctagtatttggagtcaaatgcaagtctgtctaaatctagagcccatgttctttaactgcaacactataatgtctcaccccgtcctagtcccaccaattagtcaactcttttagggcagaagtctgtctaattcatctttgcttcctgttactttatatttaattaaaaattttagtgactttttaacttgtaaattgtagctgattttacatttatcttcctgaaggaaactctgtatcattttgtcttttgaatttgtgaatatacttgttaacacatctaaatatctttaagtctttggcaatgttattgtattatatgactaaataacttcgaattgttcaattgtgtatgtcttccactatgtcagagccacattcccgtcacattataaatgaaggagtggattcttaaataagacctaaccatatttatatgattcctaacataatatcatttggtagaaagaaaaccaactgtggtcatccagagaagctcaaaaactcttgtactcaggttctcttactaccacgttttgtttctgtttcttcttagtctgtgtcttagcatcacttaaagaactattcatccttttcttatcacagaatcttggggttgttcttctcatgtcatgtagtgtaaatttatatagaaaatgtaatacaatttatttagtacatacatttattattttaatgagaatgcctcaggaaaagactagtatttgggcaatatttgaagaaagaatttaacaggcactgatggggagaaagctagctgtaggtaatgtgagcaaagatgtggaagccaaaattgtcacaattcctcaatctgaaacaatgagttaaatataataacaatgactttatgaggaattaaaggttaagctttgtgtttacctactaaacagaaaatgcctccaaataaacagtgtcacaagtacagaagagagaaatattgtttaaggctagcacatggaaaaacaacttagaggatttagcagctaaaagaagaatgagtcagctggtgatgtgcttggtcaaaacacacagtcatacatgcatatacatataccccaaaatgctaagtggaaactgcatgaattaaaagaggggtatgatagggacattgtcctttgggctaggtaggcacatatcagttggaccacatctgcaatactggattttactgaaatcttgtattttcctttttattatgagaaatttcagctcagtgatcaaagtcttcaaatagttaaaccaaaagaagaatagggctgctttgtgtggccatagagagcaaaactatgatcaaatagtgggtattatggaggaggttgtgatggtggtaagccttcaaagaaagaaaggcctttcaagaatcaaacttgataataatgaaatcagttgcctcaatggtagagagctcagcatcactggaggtggtcacacagaggtagcatgtgccctagttacagaatctattaaggggatgactgtctcaaatatgtaggacagaaatgagaagccccaagcttgcttttaactctaaggtagtattttctactctgactactttcctgttgttactactactatgctaaatactatgcatacattatcttgtttattctttctatcagctagataatttgcatattttatccccattttactgcaaagttgacaagctcagggaaaataaatagttggccagaattaagcaaccaatacatgatagacagggctaaaactgggctacagaattttcaaaaagaatgatacattctgaaggtatgtttataataaacatttttcatatgtaaaacaatggtttttgttttcgattttttaaacactttagtaaaatgaaaatgttttatacaatcttttgaaagataaaatagtctctcttactaacgtacttgctttgacaggcataatagttgtcaaggcccgggggaggggtcttaaaaatcagtcaaaggagcatgtttctttgtatcatttcccagttttaaaaatgtatacttcttggacaatgtgtaataatcattcacccattcattattattttgagcaaatatttattaagcacttactatgttctagacactgatctagttttggaaatacaactaacaaggtaaacaatgtgcctgtcctcatggagtttccatttagtggcagaggcagcaaacaataaacaaatttataaaataacttcaagttataagacgtaacgcatggagagaagaaagtggttggtataaatacagtgaataggttgaatttaactcattttaataatattatgcaagtggctgttttggtctaataagattagagccatatgagtgaatgcaaataatttgtgtttataaatgacacagatatttaagtaacctgctgactcctaagacacatctttttaaatcatggaatttaaaaatgaaatattttgtcctcttacctgctcacagaggaataaaattgatgtgttgccttcttaatatcacttaaatgtttgaaatattgacttatttttctccatcttgtaggcttgaaatgttcttgtaacttattaggaaactgtgttagagtcttactgaatccagatcagtgtccttaagaatttaaatgtttgttgaattaataaatgaaaattgaaatgtctggacatataattagaatataattttcaaaatactgcagaataaccataagcttgcaattttaggaattgtgtgcaggaagaaaaactcaaattcctgtaaatcctctctcaatgaacaatatatttgaatatctgctatttgtcaggcactgatggatatgcaaagagtaataggccacagtctgtcctcatggaacccacaattcaatgaatgaattgtgtacaagaagaaaaacttaaattcctataagttttatcttaatgtgcaatatgttttagtattatattattgtacaaccatattgcaacatattgtaatgatgattagaacatactaagtggagtaacagaagcacatacaaagtgtgtgatagtggccaggcggtggctcacgcctgtaatcccagcacttttggaggccgaggcgggtggattgcctgagctcacaagtttgagaccagcctgggcaaaacggtgaaactccgtctctactaaaatacaaaaaattgtccgggcatggtggcaggtgcctgtaatcccagctactcgggaggctgaggcaaaataatcacttgaacccgggaagcagtggttgcagtgagccgagattgcaccacggcactccaccctgggcgacagagtgagactcggtctccaaaaaaaaagaaagtgtgtgatagtgtagagtcagcaattgcaattaaactggatttgcaagaaggcttcacgggggatgtaaattttggagtagggttcgatggttgaagagaagttcaccagcaagttcacagagaactgtgtgtaggcacagacaacagcatgtacaaagctcaacgactgctgagtatttctgtgtgacttttgcatacaacttgtgcagcttgtggaagacgaaggatgatatgcaagttgactgatgatattggaggctctgtggactcttgtaaaatgatgggctgttagctagcaaacagtgtggaacctttgaggatttttaatagttcagtgatagcaccagatttctagaaagatcgctctggcaactgtgaaaaatggatttctgggatgcagaggaaagctaacagaatctggaggcaagatgagcaggaaactgttttcatactgaaaggtgttgtgctattgagaggtgaagcaaagggacagatgtgagatttctgtggtagaattagctgggtgtggtgatcagttggtttatgggatttgaggaagtgggacatactaagggtagattagagtattttagcctcgaataatatgagtacaggaagaatcttttcttagtacctaattagaaattatattaaaaatataaagataaaatataaaattaaaacaaaattaaaaagcatattttattagataaaatcataatcagtctatctagactttataatgtataatcttcattttcacttttatataagcagaattaatggaagtcaattatattatttataaagcagtacatttgagttttgtttaaaaacataaaaagaagctattgttcaaaagtgaatccatgcttctggctagccacaacatttctgaagaagaatcataaaggggattactttaattcaagtgagatcaaggcaactgccaaatttaatgaatgccaaaagtacgcagggagaatgaaaaaatccatccgaaagcattctgattttttaaaaaatcaaaaaatttgagtgaaggattaatcaaaggattaaaccaatttgaaattattaaaaaattatgttcattacaaccaattaagttaaaatataatttatttttaaaatattgtgttctaaagtatgctggcattttatccatattttttccttaaggtgtgccatgtgtttatatatgattcttaagtgggtaaaactagagagtgccccttattgtgttgccttatattaatgttgtttgtagttattattgaattcagtatcttttacctgcccggaagcatcatctgctatggcactttttcctccattgttccaattctccttccattccttccttccacagatacatatgatagagttactatgtcagcaactgtgttaggtgtgtgagatatggtagtaaacagaaaatatctttacccttactagcttataccctgttagaggatacaaaaaataaacacagaaacacataaataaaatttgaaaagtgctaagtgctctaaacaacaacaacaacaaacctagggtaatatcactgagggttggcagggggcagatgggagagaaaggatagaaaaaggcatcaccttattttgggtggtcagggaagacctcagggagaagatgaagatgagactaaaatagtaaggaggagcaagtcatctgcaaataaggaagaggtgcttctgaaggaaggtgccgccctgcatcttaaggctggctgagcttggtagactcacaggatagcaagggcctgagtggccagagctccatgggaagagtggtggccaggcaagcaggcactctagggtaagactttgcaggccagagggtggaatcagcacttcactccaacgacattagaaattcctggagtgttttaagcagggtatgacataaaccaaggggcagccagcaattcagttaggagaatattatggatagtccagaaccatttctagatgtttggctttactaatgggatggagggtggggccattttctgaaatagagatgggtgggaatagctttgagggaaattcagaagtttccctctggacctgaaatattttagagacctattaggcctccagaggaagatgtcaaggaggcagtgaatgtctgagtagcacacttccttttctattataaatatttgctgaactgtttaacagtgaaaattgctgaagcggaaagtaaaatctttacacgtttgattgtttgggttctggaagatacagcataggaacaatactgcattgaaagctttacagaatcacaatgaaaatttggttaaaagaaaaagaaataggactttattttgctacttagaacaacaacaaaaaagtaggaattcattaggtagttagtgcctgttcatttctgtcttaaatatttcttgttttatgaactataaggaatcaacactattgaagctacaccatagctgatggattttttcaaaggagatagtgtgttttaaatgtaaattgtatctcaaataaaatcttaaggctgaatcacgactcataaaccattcttaaaaaatggctttagaagttattaatagttttattaatcctgtcatgaaacagtgactgtcaaagtacagaaactaacatataaaatcttatctataaaaaaatggtcattgtatctcacttatttttatttttatttctttgcagatcatatattttagttctctgtttccatatgtggtacttatttgcttcctcatcagagcattccttttaaatggttcaattgatggcattcgccacatgtttacccctaaggtatgtaccatatttctatttaaggcttatgatcatgaaagcattatgtttattgttaaaatattctaagttatatttaaggaataattgttctaatgtatgtacattaaacttttaaattatagttgttaaccagtctaggaaaaaccagcattttttatgtataattatagccatttatctccattttttatatcccattttgattttagagtaaggctaccactatttcaacttcaaaaatctctcttttataataaatttatttctaagttttatactgattagacttcagaatttttcagtcttccttaactctttcccctttattttagtggtttttaacctttttgtgtcatggatccctttgaaaaagtgacgaggattttttttcccaaaaaaaaaaatgaacatattaatttgcttagtgtatctggaagttgactgatcatctagaatccatggaccctaaaataagattaagagccctaaaatactctctcagagaaaataagtgttttcttttcttagttaatttttttgaggttttgtagttttgtagcttctggaagaatatttatagtaatcagcttgtgaagttctgtaacttctatagatgcatatatattttaggaaaattctcattagactccatcaagggctcagaacttataatccatcatgcaactttgtagagctaaactcaacggtgggcccacttaacctggttaatcataagtgtgggcttaatcataatttcttatactgctttaacagggaccacgtttttgattctcatatatatatatatatatatatatatatatatatatatatatatatatatggtgcaccccactattagtttgctaatactatcataggcagacattaagatgaaactgtctaaagatacgatttcaaaattagtttagaaattaaaagttatctgaaggatgaatgtgcaggcagcattgtgctgtgagatttgggcataagggattagcttctctggaattctttgtcactcctggcggctgccttgatactgcgtaaaagaagctgtgttctttgtgtgtgtggttctgagttggtattcattctgtagtagcaaaaatgctgacactggtgtctggttttctcagctacttcaaaattcctgtttaacatttagagttcttggaacttctctgtgaacaactagttaagatttacgagtttcagccacactataatttaaatctgctacaaatgggccacacttaatgaccaaaaatacttatatgtataatattgaagaaaatgttttctgagttcaagacaaccaaaattctgtgtgaatttctagaatatattctctttctaaactgacaattgcttgtgacaaaattctaaacatttgatttagctagatattttagaatttaaatgcttatatgtaataattctatatggccccagtactgaaaactgcagcatgaattaacatttctgacctagactagggatcactattaaaatgttagttttccttcagctaacttttcattgagtgttgataagactctattacatttctgtaggatgtgatactcaatatgagaagtaattgtaatttttaaaaattttacattgtttatgtaggggagaaagtacataagcacatcaaatacttgtgaaacagtgagtggagatttagttcagaaactgggctgctggtaatgtctttagttaataggtcttttctgccatctagtggctaaagcagagatagacagttgagtgtattttaatagaatatgatgtagcaatggtcagtaaacaatgtgcatatgttaattgttcataaattatgaagataatcatgattatgtttaataagcatatttcatagattttaataaccaaaattagttgaagcaatacatcctattgtttgagagaatatggattttggaatctacctatgttcttatttcatctctacctcagagctgctgtgtaaacttaggcaagttacataaccttcctaagaatcagttaatagtggcaacaacttcgtgggttgttgtgagtactaaatgagttaaaccatataaaatgcttaccggtgtgtatgccgctatagctcatctatgttatcggttactgagcatttttagagtgtggtaggcaccgtggtaagtggtacacttcttattattctgatctttctgaagaagctgaaactcagagaggacacgccatttgccattgtttgcactattttaaaattactaaatggcagaatcagaatctgaaactctctgtagaattcgtgttcttagtcatgtttgacattgctctcaataaaggcaatttgattgtaatggcaaaaagagataaaatgccaatttaaacgctattattactgaaatcaaaaggaactgtttattaagatctgggccacacttggctgatctgaattgtttcatttaagttttgattatatacagtgataattatctaagacataaagcacaactacatgaaatatctgttcaatatttaatatctgttcaatgtcagaactttggatctgaaagagtatcttatagacaatataggtgaatttcttcaattttcaaagaaaaatcttttagcagacttttgaatgaatgaagaatacatatgtgaatatgcaaagtacaaatagttcaactctgcgaagtttataattgttttctgcttcgaccattagattaacagcagaaaacacaaaacatggagtgttagtgaagcaactattaacttttattggtaattgacctgttttgctatggaaagaaaaaaagacataatgggaaatgattgaggataattaatttttcttcatattctcatttcatatttcctttgatattcttaaaatatttaaaaaccaccatgtaagtagaaaatccccatgtacttaaaatctccatgtaaaggactgatcaactttcttactcataattatttgtttcctaaaaatagatgtttatgcttaagaacatattatttcccgatttaaataaactttggatgcataaatatcattgtatactccataaacagtaaattccataaaaattaattattctgaaacattattttgtagctgattctattatgtttatttttaaacagcttgaaataatgctggagcccaaggtctggagagaagctgctactcaagtgttctttgccttaggtctgggatttggtggtgtcattgccttttcaagctacaacaagagagacaacaactgccactttgatgctgtcctggtgtccttcatcaattttttcacttctgtcctggcaacattggtggtgtttgcagttctgggcttcaaagcaaatgtcataaatgagaaatgcattacacagtatgaatattaatttccatttgccttttttcttagtttttatcttgttatttatacttttattgatacatgatagctatacatatttatgagatacatgtgatagttcgacacaaacatacaatgtataatggtcaaatctgggtaaatgggatagtcatcacctcaaacattaatcatttctttgtgttgggaacattgctcattcattagcttataatggcatagtcgttcacaaactatacaccaaagaactcttatgtgctcatttgtatgttgttttatttttcagaaattcagagacgatcatgaaatttttgaaaatggggaacattagtcaggatattattccccatcatatcaacctttcaactgttactgcagaagattatcatttagtttatgacatcattcaaaaagtgaaagaagaagagtttcctgctcttcatctcaattcctgtaaaattgaagaagagctaaataaagttagtaagccatgtttgagcaataaaataattatcattcacttgaaatatgcattatccagcagactcccttcaggaaaagggccttaaaatgcccgaagaagctcttaaaatgcccggagaagctcctgggcattataagtccttcagaatttacattcttaattttagagaatatgttttcttaaatggtaaagatttgctttattttaaaaagttatttcattgattgagccacaataatttaaaatatgaatataaagtgattttcatcatagaatgatgattagtctgaaatctttcttgctataattttcaatacagaattagaattatggctctcatttacacatacatgattgctttgatgcatgaataatatttaaaatagaaattttaatagttgtgttccacaagtcatgatcaagttcttttttttttttttgagccgtagtctctctctgtcgcccaggccggggtgcagtggtgcgatcttggctcactgcatcctctgcttcccaggttcaagcaattctcctggtcagcctcccaagtagctgggattacaggcacataccaccacacctggctaatttttgtaattttagtagagacgggagaaggcggttcaccattttggccaggctggtctcgaacacttgacctcatgatctgcccgccttggcctcccaaagtgctgtgattacaggcctcagccaccgtgcccaaccgatgaagttctttttcttagctatgttgtattaaataagaaataggtcaccattaataaatgtccttatattggctgccactgtctcctgtatgtcgaaaaggaaaatataatggagaaattagtcactaattatttgctttaagatagttaactgtacttgagactaacataaagaatcatgtgtggatattattcattaaaaagtaaagccatcattaatataaaaaccttgaattccttaaggaaatatttaattaattactaatgtaccgttcaaagtttttttttttaattctcatctgtctttatgagacaacacaacttgaagtttggttataggtacagttagttagacaaagtaagttgttattttacaactcaatatttgtgatatttataaaataaactcacattaatatttgcaagtaattcaatttctttctgcccaattggagtatctgtctttttattcattttgttattagttttgactggaaattcattgtgtcttctgaattatgcaaaccagtatatcagcccaactttttttttttttttaatcagggaggtaggaatatcagaagtaaaaaaaggtaaagatgtaggttttttaaattaaaaattggctttttataatctacttattctgttcacatccttttattttgcatttgcagttttctcttaaatcaaaacaagtttattattcatagtgtatatgtatatatatatataacaacaattgattgagccactttgaggtaaggtaaaaccaaatttttaaaatctttatatatgagccagaaatagttgtatatatatatttgtatttatatatctatgataatatgtcactattcatattcataagctttaacaaaaccaaaaatattatgtattctttaatatagtttttcattctaggagccttgtgaaatagttagtatatacaacacaatcgtgtactctgtttattaattataggcaaaatttcattatttggatctgcttgatctaattaaatccaggttctgagaatgacaacatgatttatcaggttaagagctgatttgagcatgtctatttccagcagtcctggccattattcagagatctttcctcctcattgtaactgacatatagagccattgtttaataattactctgtactaatgttgctattttgtgtattttgcaggctgttcaggggaccggcttagcttttattgcctttacagaagcgatgacacattttcctgcatctcccttctggtcagtgatgtttttcctcatgctggtcaatctaggccttggcagtatgtttggaaccattgaagggattgtcacgcctattgtggacactttcaaagtgaggaaagaaattcttactggtgagttttttgtatttgacttttcattgaacaaatccaggccattttattcttggtgaaagattagagatgaaaagtggaaagtcttatattttgagttttattaatgtctattatcactatttattattgtatacattgtataatttattttattttattttaattgtataatttttattgtatgtataatataatatggatgttttaatataaattatattttatcatttataataaatatttattgttataattcattaatagtaatgcattatcaagaatgactgacactagaataaagtcatggactgtttgtgtataatttttatacaagtcaaataatcataattagagcagttcagatgtgatattcctatccaaaaagtgcatagctgaaaatgataaacctaaatcccgttctcatatacagcagcagtagtaatttactagtagttaatgtctccaagtagagaagaaaataaaacaatttatcaatatggatggtagttaataggtccaatttacaagtgattattaaagtaccagtttaatgcatcatactcccatttaagggctataaaggatataaaataaattataagagatatacaaatatataaaaaactcttctccaaaaacaataacactaaaattaaaatcagattgcatagataagacttacagcatgtaaaatactgatagcataatggattttacatataagaattcaaaagagtctaggtcatctaaatatacgatggaactgtcagagaaagagatgaaagttgaattggaaagaggaaggatcttctcaagggtcagaggatagctagtaaacatacataaatgaagataaaggcaacaataagaaagccaaccatactagagtacagaaacaatactggtaagtgatgtaaaataagattggatacaaattttgtagagatgaccatgaatgctgggcagtggtgtgcaattccccaaggctttttttttttttttttttttttgagacggagtcttgctctgtcgcccaggctggagtgcagcagtagtgcgatctcagctcactgcaagctccgcctcccgggttcacgccattctcctgcctcagcctcccgagtagctgggactacaggcgcgtgccaacacgcttggctaattttttgtattttttttaatagagacggggtttcaccgtgttagccaggatggtctcaatctcctgacctcgtgatccgcccgccttggcctcccaaagtgctaggattacaggcgtgagccaccgtgcccagctctttcttagccataaaaaatttactaataatatatgtctaaataagtctcaaatatatacctttatcatttgctgctctgataattatgtctgtatgtgtttgtgcatgtgcatgtgtgtgcgtgtataaaacaatttaatttcagcagtctgttaatattgatagctatatatccacaattcagctgaacagaaatgagaaactgctttatattattcaagaaagtgatttccacttaatatgaaaatccatatcctgcctgacatgcaggctaaagtcatttttgtattcttatccttgctcgccatatccaaaccgtcccctcctgtagtaaaaggcttgcaggttaaggaaaaagtaacagtgtaaagggaaaatcacacaaagtagtattttctaagaccttctggaagacttatttggaaagagcaaaggggaatgtaccctctttcccacttcttgttttttgggatcatactgatacttcaaatcgtagtcgtgtttgacctcaatgaaatattacctcattttctttggtaggtgtgtttacttctttatgcagtaagatttaggcaaatgaattactcattatctttttccctcacatctccagcaaaactcttactgtctgtaccacttataatgcacttttttatatttgcctcatactggggtgtaattaggagatagtgaaagtgacacaggctgttgaggcagacagatttgggtgcagatccaaactctgctacttccagcttgagaatttaagcacattacttaacgttcttcaggatcatttctctcatctgtaaacaaagtaatacattgttcaactgggatgtcataaaaattaagtaagagaatgcaatattattttatactgtgataagcatttaaatttaatatgcagtagaatccaagtaaatgttacttttcttattctacattatatgtttacatatgacattcatttctgtaagatgtaactcacagcactagtatagtacttaagagatggaggtaatttcttcatgtcacacatacttgctgaaattgttagggagtgttcatatgattgactccgtggatgtcttttttccttagctgccattactactctacttctttcaagtttactcacctctgccgaaatgtggttgagaaatggaatgcagtcatcttttacctttggaggcttctctgctaatgagcacaaaagaacagagtctaacaaaaatatgggaatattatatgaatttcaaaaacttttctaagtagtagctggtcagaaatttatgcatctgtttcttagctattactggggaaactctttttagatgatttttcttagatgttatgtggatgatcagattgctcaactccattataatttgtttccaaactaatctgttcaggcaagataaagatataaatgtggattgttgctgaggttaagtctggtcagatttttccacttatgcttgaaaagtaaccatatttcaatcaaatatataatatgtatatttcataataatataagcaatattagtctcattattaattcaaaaatctcatctatatttcaacactgtagaacattattaaatgaataaatgacctataaatatttggtgcctgaagaagtcactttgctattaattatacgaatagagtatggaaatttatacttttaaatttttctctaaactttgactcatttattattgtacttggtaaatgagtttccacgggctcagggagatgaattactgtcttagaataaatttgtatgaatgttgaggctacacccaggtaacctaattcctaataggttatatgccatgtatcaggaaaggtattgcctgtttatatgatggacatgttataaaagttttaaaagtttgaatataataatttataataaagtttaaaggccttgtctctgaatagagtctcattttttcatttatttcttttgtctagttatctgttgtcttctggcattttgtattggcctgatatttgtgcaacgctctggaaattactttgttacaatgtttgatgattattctgctacactgcctctgctaattgtagtcattttggagaatattgctgtatgctttgtttatggcatagataagtaagtatatttgcttttatgtattcacttttaatctctagtttgaaaacatcaattatcaatgttcatttcatttagaagaggaaataaatgaatagagggaacaattctttaaaaaatcaaaccttttgcaggctctcactgattcaacagttttggtaaattacatttccctgttgggcaaatagaattatataggatgtaatagtatgtagaattttagatctttgatttggtcctggttatcaaatagctaactttcaggatttagtaagtattggcagagttccaagaaccttagtttcttttgagttctttattgttatctacatttcacagataaggaaaatcaagcttagagagacaccctgtgacttgcctgtcacccacctggacagcagcagacctgggactcatgtccatttctgtttaactctaaagcttatctcctaattatattgctaaattgatttataagaggagtgcatgtgtcataatgccttatatagcaggacaatattgggaaatgatattttcccaggtctgagatgtatatgtcatttgctgcacagaaacattatttttatatagagtcattacttaaattcactatacgcataaataatgaataaattcactatttattcataaattcatatcaaatacacatacttttcacaccattcaggtacactgatgtgaaaagtgtatgtatttgaaatgatgtgaagcaccagagttctctcaagggaaaaagacctttggaggatttgtccaatactttttatagtcactgtctctaatcacatacatggactgagaggtagtaagatcaccaagctcattacagccctatgtaaagtagtaatgcatgcaccttaagtgaaggccagagtccttttaagcagcataaagaatattgtgggtattgaatgagctttataacaaagcttagagaatgttttttgtggttgccaaaagctccaggtcaggaagcttaggagaacttacatttaataatcatgtactgtataataatagtagtaatagctcttagtgtataatccagcaatcatgctacttggtatttacccaaaggagttgaaaacttatgcccacttaaaattctgcacgtgggtgtttatagcaactatattcataattgcccaaacttggaggcaaacaagatatcctttagtaggtaaatggataaattgtcatacatccagacaatgaaatattattcaatccatgaaaagacacagaggaaattttaatgcacattacttagtgaaaaaagtcacatatgaaaaggttacatattgtaagattcccctatattataatatggaaaaggtaaaactatggaaacagtaaaaacatcagcagttaacaggggttgggccagatccagggatgtatacgctgagcacagaatgtttagggcagtgaaactactctgtatgacactgtaatggtggacacacgtcattatacatttgtccaaatccagagaatgtactacacaaacagtgaattccagtgtaaactgtgggctctaggtaataatgatgtgttaacttatgtaggttcatcaattgtaaccaacattccactctcgtgggggttgctgataatggaggaggttatgcacatatattggtaggagctatatgggaaatctctctactttcagctcaattttgctgtgaacctaaaattgctcttaaaaaataaagtgtgtaatcaaaaaatactccttgttaactaacatgatccatatcttacagatgggaaactgccccttcttttacaggaggatacaatatgttagctgtagagccagtactgtaaccttgaccttcatttcaaggccaggtttctctaagctttactaggctactcaaaactcataacctgtaccatgatggaatttgatattgtttttggactgatctgtaaataaatacatttgtaatttagatttccatttagacagttcgttattcatgatagacttactaaagaatctctctttttaatgctagtgttcctgaataacactatttataacaacagaagaaaaaatactactactaatagatgcatctgtcgattttgtaccatatgtgaggtagtatgctaagcatccattgtttatggttctagtaataaccctcaaaggtgggtattatattatatttttggaaaacaccaaaaatgaagcttagagagattaagatatacatcaaaagaacacagaactgtgatctgaaatgaggtctcttggtcttcaaagttcatattttttctaaagggcaggtgtagaattcttacattgaagatgtcctttaagattctggagcaacttggaagaaatgaaaaagggaagagaaacatagagattaagactgggccaggtgtggtggctcaagcctgtaatcccaacactttgggaggtcaaggtgggcagatcacttgaggtcaggagatcgagagcagtctgaccaacatggtgaaacgccatctctactaaaaatacaaaaatcagccgggcgtgatggtggtcgcctgtaatcccagctactcgggaggctgaggcaggagaattgcttgaacctgggaagatgaggttgcagtgagtcgagattgtgccactgtactccagcctgggcaacaggtgagactctgtctcaaaaaaaaaaaaaaaaaagaaagaaagaatggactcaagagacataacaattcataacaattagttattatatgtagacctttttagaaattcggaatgtaaaaagaagagttcagaaaatataacattgattaggtatatttgatgatattaaggaattattattatgcttttaatgctgtgatattaaggaattattacttttactaattattactaaagtaatagtaaaattattaggaaaagtagtaattagtaaaattatttactaataagtaattattactaaaagtaataattccttgatagaatagtattaatagcatagtaataattccttaatatataattacttaatatttcttaataatatttaagcagtaattactaaaagaaataatttctaaataattcctttttgtaattattacttgtattactaaaaaagagacaagaaatttttaatatactgaaaatattttgtttatagaatagaaagttatcagtagaaggagaaatcagtaattggcttaagagagctttccctaaataaaaattatagtacttacctggcttcattttactttatagtcatcttccaagaggaactttgatacagtataaaatgtcatagggtatcaatggtaaatgtttgtcagaccattaatataatgcacattttttaaggtttagcaatattaaattaaggaataattaaatactttctttttattcaggtttatggaagacctaaaagatatgctgggctttgctcccagcagatattactactatatgtggaaatatatttctcctctaatgctattatcattgctaatagctagtgttgtgaatatgggattaagtcctcctggctataacgcatggattgaagataaggtaaatacaaaataagggaattacatttttaaaagatatataaaaagcttttttagagggctttttcttttgtctccatcacagtattttttgctgtttaatgaatggcatagcttttatgcaaggatatgagatttacgtttgtgctctgccccgagcatatgtgattttttaaatacattgtggatgttttcaacacatgtgaagcactaaccttgtccttattaaagcagatatatccatcttaacactgatgaaccaataattattgggcctttgactctagaaaacatattaatcaaaactctagaaatattttaatatatgaatttatgaagttgtatcccaggccaggtgcagtgactcatacctataatcccaacacttttggaggccaaggcaaaagcatcacttgaggccagcagcttgagagcagcctgtgcaacacagagaatccctgtctctacaaaagatgaaaaaaattagctgggcatggtagcacacggctatagtcctagctactcgtcaggctgaggctgaaggatagcttgagcctaggagttgaaggttaaagtgagttatgattaccactgcactccagcctgtgtgacaaagcaagtcactatcaatcactcaatcaatcaataaacaaataaataaataaaaattgtatcccagattctatgtaatgatgaaaaatatatattagcaaagtacaatttaaaataagtaaattttgaagtaaagttctgttataatttttatattagcaataactatttcaatttctattctcaagctgaataataatgaaatcattaggtatatgtcagctgttataaaataaaagtgcttattttcagagatacttctgacctttaactatcctatggttaataattctagactgaggcataaacaaatccgttctctcaccaaaacccttggggccagatgtgcttcaaaagtttggtttccagattttagaaagatatatgacacatttaagaggtatctattgcttagtaacaaactaccctgaaatttaatggctaagagcgacattgatttattatttcttacagttctgtggctgagctgagcagttcttcttcttttcttgcctgggctaactcaagcagttgcattcagcttggaggagagctgggctctctctttaggtggtctttcacttataacgtttccaagcatcatattcagggcaatattctaagaaagaagcagaaattggaaggcctttgaggcctagtcttggaagttgctgagtgtcacttctactgctttctattggtcaaagcaagtcacaaagccagcccagattctttgcttacaaacttgaagcaagtacaatattttatgtatgtgcaaagaaagatagattactaataattattattttcttctttaacaggcatctgaagaatttctgagctatccaacatggggactggttgtttgtgtctctctggttgtctttgcaatactcccagtccctgtagttttcattgttcgtcgcttcaaccttatagatgatagttctggtaatttagcatctgtgacctataagagaggaagggtcctgaaagagcctgtgaacttagagggcgatgatacaagcctcattcacggaaaaataccgagcgagatgccatctccaaattttggtaaaaatatttatcgaaaacagagtggatccccaactctggatactgctcccaatggacggtatggaatagggtacttgatggcagatattatgccagatatgccagaatctgatttgtagctgggggaaaagtcagtgggttttatttggttcatttttaccaatgaacattggccctagtaggagaagcattaggcttcacttatcagagggcaatctcaggtgttccgtggctgtgatctttaatcctaacagtatatgtcagttcaacttgagcattcttttggattctttggtttacatttgtgcagaaaggattgcagacaaatcttaggagggctgaggtacatgtttgccaggatttttttttaagtacctttggtgtattttcaaatatttctatctcttaaaaaaatggtattacctcagtttctaataatttctgggtttagtagtgttgacaattaaaaatggtatacattaaaatttataagtttgccttcagggtaacttccagtgtcacaatgagcagttctgtaagtgggtgcctctcagcacatttctatgaatatattatgtagataggctgtattgattttggtagcattgacaccttcttaggcaattagttgaagaaaactgcaaaatattttcttatgtaatagctgtatagagcaatagcaatcaaagcatgagaaggcactaacgctgggatgaaagatgagattcagaggtgactgagaatcatgtgagtgatggctgtatattttgtgtaaaatatatgtgtgaaaatgaactaagagtgagttactcagcactctcaagaattatgcagattctgcatttttcttatgccgtgtgcctaaaaacctacttgatatttattgtggtttcaagattattcatagtatatttatacaatatacttgcaatgcatttaagtacttaaagtactaatttgaaaacttgaagcaagatggcattttaattaatatatttctgttttgcttctgttttatgcaaatataaatcatttttaagtgattgttaaaattgtaatgcattacattttaatctacaaataaacaaagtttaaaaatgatgtttgtttttcacattgattttctttgtatcacctgaactggattgtctttcatttcagtcagcacttagacatttcataataactaaacatcacattccaagtgggatgaattacattaattgaatagagttaccaccgcttcagagtctaaggaaaaatagagtattatggttcaatggtgttcttatgtagtcttatgattcttgaaaaagtacttacagcctcccaagaaaccatgtgtacaattgactgcttgctgattcaatattgtctgcaaagtataaaagactatgatttttaaataaaactgttgtatatatgaaattggatagagcagaggaacctcactgagtgtcctctagttaaaaatctttcatttatcctaccaccagatcagttacatttttaaaacaatgatggatatagcagcaaaataagtgaggtaatacacatgccatatcaattgatttatttcagccagtattctcgctctgctatagatagatgttaataaatggtatcacagcatttaaagtattaaatccactggtgcataaatttttagtcttttaaaatatattcatgaatattgtgtttgtatccctttaaaatgtttaatattttataaataggcagtatatgcacattatacaaaactaaaaaattatgacaattcagtgtgaagtaagttctcatccaacatttctcctggccatccattctccatctttaaaggcaatcaccattgccagtttcttctgtatccttctggaaatacaatatattacataaatgacagcattctatattctctcttctatatcttacctatttctgtgaataatttattttggacagcattttatgtatgaatattcacaaatgtgcttccttatttcagaggctgaactaataaaaattttgtttatttttgtgttgaggcaatatttttatatggtaccctaatctttaatacttaacctgccagactttaaccgtaacacaataatgtattgccaaatagcaccattcttcttctctcactctcttgccatgggggctcttaaaaaaaaaagtatacatctaaggtgtacaacatgctgttttgatgtatataaatatagtgaaagcaaataaagtatatatctaaggtgta

SEQ ID NO: 447 - DNA, 9075 bp, Homo sapiens
  source 1..9075: mol_type = genomic DNA; note = NC_000001.11:c153968184-153959110 SLC39A1 [organism=Homo sapiens] [GeneID=27173] [chromosome=1]
actacaaaagtggatgccaccttgccaggagccacggtagggccgctgtatctgggagtaggggactaagagtctgagggtccacaaacggaatttaagaagtaggtagccgcgccctttctgctgcagttttctcttagctatagtaaatcttcctgagggtttggtgtctcctagctgaagaacagaaaaggctgtgactggagcacaggactcctgaatgcctgttctgtagccctcgcttttgcaagagggagatcatggcagggttgtaaacaaaggcggaaagagtcaagagacctgcgaatttactagggcatcccctcgcccaccgcgtggcgctcttcccaaagctgagtcctgattggaagctgaagacttaggtttcggaggggcaggacatcgagccaatggcacactaccctctcaaggccgcctcttccgtaactggtcggagacagtttggctgttcaggagagtcaggccaatggggccgcagttctttcttttttttttctttattcttatttttggagacagggtctcgctctgttgcccaggctggagtgcggtggtgcgatcacggttccatgcagcccccgacctcccgggctcaggtgattctcccgcctcagcaccgcgagcagctaggaccacaggcgcgagccactgcgtccggccggcgggacttatttgtcaggcggggattgggttccgccagcctaaagggaggggtaagcgccagaatatgaatcgccgggaagctgggagaaagctccgggaaaccctgagcagccaggtttgtcttcgcgcgccacgtgactcggaagctccggtttcacccaggcggggagtcaacagcccgctgaccccagtggagcggtgatcctcgctcggcaggcggcaggagcgcgatggcgggtttccccgtccgcaagccgagcagtgtggcgttaatggagaacagcagctgtgcgcacacgctcgctgcacgctgctcattcacggagggacacggggcaggaaaactgcaacaagttaaaaagccttttgcgtttgttgtcttattgtttgcatacagttaccgggaacattatgtcccacacttgtataatttacaaaacgttttcataaaaattgttctcttccttaatccataacagttctgaggcacacacggcgggtaatattttgcaaattttacctatgaggaggcagatccatgactagaaagtagtaataccaaaactcagggttgattgattatttttatttttttgccttggtctaatgtctgatggtccaggaattcacttcaagtaaaacaatggaggtaaactgatacaggtatggttttcagtagtatttcagaaaagggtagctgggtgagtaaaacagtagtttggagtgtgaatcccagaactcaaactgctactaattatccttatgaagatttgaacgggctaagggtaaaaacgggaacagggtctagtcaggcatttccatgttactcatataattcttacagcagatggagctgacaagtttgtttgtttgtttttcttttgctctgtggcccaggctggagtgcagaggctcgatctcggctcactgcaagctccgcctcccgggttcacgccattctcctgcctcagcctccctagtagctgggactacaggcgcccagctaatttttttgtatttttagtagagacagggtttcaccgtgttagccagggtggtctcgatctgacctcgtgatccgtccacctcggcctcccaatgtgctgggattacaggcgtgagccaccacgcccgtccgagctgacaagtttaagtaactttctcaaggttaccctgtaagtagctgaaccaagatttggatgcttcagcccatgttcttcacactatcaacccaccttgtggggctttctcagatttcttatctgtctttcccgctcatatctctccatcctgctcaagtagtgaagagacaaagcagccttcctagattgatgcagagctccaaggaaagcaaagctgttcttgttgagatcattctgagagcgagaaaggtggttaaatacatttcaaagggcttcctgcgggctgtatgtgcagagatgatttgagtggggaatgtagttagcttccgttgatgttagaactggaaggaccctctgcagtcatctgcttgtttaacttcctccttgcccctgatttatcaaactctggtgaggaaaactgacttgcctaaaatcatacatcaaggtaaggtaaaattgaggagatctattgggccgggtgtggtggctcacacctgcagtcccagcactttgggaggctgaagcgggtggatcacctgaggtcaggagttcaagaccagcctggtcaacatggtgaaatcccgtctctactaaaaatacaaaaattagccgggcgtggtggcgggcgcctgtaatcccagctactcgggaggccgaggcgggagaattgcttgaaacctgggaggcagaagttgtagtgagccaagagcatgccactgcattccagcctgggcaacacagcaagactctgtcaagaaagaaaggaggaaagaagaaaggaaggaaggaaggaaaaagaaaagaaataaagttgccaagagattttaaatgttctcatcacaaataaatatgtgaagtaatgcatatgttaattagcttgatttacccattctgcaatgtacatatatttcttttcttttttctttttttttgagacggagtctcgctgtgtcgtccaggctggagtgcagaggtgtgatcttggctcactgcaacctccgcctccccggttcaagcgattctcctgcctcagcctcctgagtagctgggatcataggcatgcgccaccacgcctggctaatttttgtatttttagtagagacagggtttcaccatgttgagcaggctggtctccaactcctgacctcgtcatctgcccgcctcggcttcccaaagtgctgggattacaggcgtgagccaccgcgcccggcccaatgtacatatatttcaaaacatcatgttgtacaccataaatatatacaattattaatcatatatgacatatgtatgtgtataaataaacaaatatatatatttgacaactataaaggtagaacttggaccagaatccaggtttcctgacccccccagtcataattccttgttaatgttaccaattacgaataatttttttttttgagacgaagtttcgctgttgttgcccaggctggagcgcaatggcgcgatctcggctcactgcaatttccggctcccgggttcaagcgattctcctgcctcggcctcccgagtagctgggattacaggcccccgccaccacgcccggctaatttttgtatatttagtagagacggggtttcaccatgttgaccaggctggtcttgaacttctgtcctcaggtgattcatcctcggccttccaaagtgcttggattacaggcgtgaaccaccgcgcccggccccttaagaagtcttcacattcctcttttacttaaggaattactgggcttcgtttctggagccttgtgagaagcattacactgtccccccttttttttttcttttttaaaattaattttcctgtaggaagcaagatcccatctgtcccttctttaggcaatgaagcttttttcacctttgcataaaagaacagctgagccccctttttaaattttcttttgtcttaccgtcccttgaggctagaagaggattctcaaggcacagagttgtgggccacaagaatccaggttgaggaaacggtgaaagtcctgagctgaaacaactaccttggggcattcaaggaacagcaaacagcaaaccgaccggcgagggtggcgggagctgggctggaaatcaggtgggagaaccggccagacgcccgcaggcgcggtacgcagatatcctggaatgcgctgggggctcttccctgggcgcggcttcagcaccccgcattccggtcccaccacgtccccacccacctggagaaggcggaggctgcactgagtgccataagtagtcgagaagggatgattttcaagacataccctctctttgctttcccccctttccaattctgccttgtctttttccttgttgtgggtgctggtgagggaaagcagtcaaggaagttggtcccaagaggggaatgctttcccttgggcgccaagaggcactgacgaggtgtcagagccttctgagggacagatgagactttggcccaaggccaggaagatgttttcagatgtgggccggaagacttgacaatgcggggtctccctcttttaaaaatatccatataatcaaagcctttgttgactggcccgctccggcccctcagtcctccacagatgcgccccagggccccagccccgaggtccttttcctaatatccgctcttgctctcgctcactctcctcaggtcgcctgctccgcccgctcccgctcccgatctctgattgctcctaactgacgtcactcccggtctgtccccgcccactcggtgctgccattggcagtcggtcgtgggtacgcggctcctgtgggggaggggggagctatgggagggggcgggaattcccgactctaggccggaagcgcgcggagaccatgtagtgagaccctcgcgaggtgagtgcgggctgtctggcagcggggtccatgtcggctgcccaggcctccccgggcccgggaacaggagtcccagctcacgcattcttcatctgcttcccgcgacgcttggcggcctcgcaccccgcctcctggagcccggactttcaggcaccgccctcagtgtcgcctcagtccgtcccgggaccgcagactcttagggcccctctctttggccatctgcctctaggtcccatcctggggcctgaagcgcttgttctctgcgctgggaaaaggggaacgatggagcgatccagcacccaaacttaccctgtccaggtggcccacgaagctacccaagacatctctgcacagccctagcctttttggcttcacccactccgttcgggagttggggacccggcctctacattccttaggggaactccagctccaggtcctatttggaggcggctcctagtttcctagttttctgggggcaccaggtgaaagggtgatgagatatccatacagcctttctcatgcctcggtttcccccgtgcagtctccctgaataagtcacttgggaaagaaagtgtgagaagagaggaatgttcctggtacaggagtagatgagtcaccctgggtaggggaaggtcacaaagtggctggggccagggagctgcactctgctgaccaagcttccccattccttgccccatcttcctttgcatgatttttcccaaccactctggtctgtcttcctaggtctgagagtcactggagctaccagaagcatcatggggccctggggagagccagagctcctggtgtggcgccccgaggcggtagcttcagagcctccagtgcctgtggggctggaggtgaagttgggggccctggtgctgctgctggtgctcaccctcctctgcagcctggtgcccatctgtgtgctgcgccggccaggagctaaccatgaaggctcaggtaagcctctccttttccccacactgctatgaatgcttggcttagggagggctctggggctggcggggagtgaccaaaggaggagggaaaggcaagggtagccattgtttgggttggggtggtcggccctggagggggtttgtttgcttattcccctctgtgcttcacccctacccagcttcccgccagaaagccctgagcctagtaagctgtttcgcggggggcgtctttttggccacttgtctcctggacctgctgcctgactacctggctgccatagatgaggccctggcagccttgcacgtgacggtgagcactggcctgggcatgtgacttgcgggaggggaatcacacacctctgggagtgttggtttgtggagattgattcatgtgccactccatgactgtgtggaagacttttggcatgtggtatgaattgtgatttttggttatggggcataattctttctatgtgttccctcccccttccccattccctgtgtgacccctacattcccgttgagacagtaagacactttttctcaggtgtgtgacttgctctatgggttctcagttctagctaccagcaagtgctccaagaatcatcttcactctctcaccactttcctaaagggctggagatagaggtctctgtaggcctgagaaggataggaagcgattccctgggtcttggtgttgctaacctttttaggctttggcccaaggaagtgggctgtgaggaatgatcaagtccacggcataggacttggtttattataggaaaaactgaggccgttggatagtggggcaggaaagtcatcctgggctctttccttttttcctctaaaactgaggaagtaacactggatgtatccctttgtgtgtctgtgactgagtgacctgtgtttccgtgtgactgcgtataagcctgaatgtcctgtgatatgtggctctatgtatgagtatttggggagatgggcaatgtgtgaccttttcatgtatgtctacatcagtgactctcaactaggagtgtggctttgcccctcaggaaacatttggtaatgtctggggatatttttagttgtcacaatggggagggggatggagggaacattgtgcctgctattggcatctggtaagtagagatcagaaatgctgttaaacaatctacagtgcacaagacagctcccatgacaaagaattatctggcccaaaatgtttttgtttgtttgtttttgttttgttttgtttttgagaaagagtcttgctctgttgcccaggctggagtgcagtggcacaatctcgactcactgcaatctctggctcctgggttcaagtgattctcctggctcagactcctgagtagctgggattacaggcatccaccaccacaccctgccaatttttgtatttttagtagagacagggtttcaccatgttggccaggctggtctcaaactcctgacctcaagtgatcttcccactttggtcttccaaagtgctgggattataggcatgagccactgcccctggccccaaaatgttaatagttccaaagctgagaaactttggtctacacgtaacactgtgagtgacaccataatctgtgtgtacgtatcattctgtgtcagtgttaccaattcactctatctttgtgtgactgagagtagccctgtgtctgtgtcagaccctaggtctgtgtaactgggctttcaccagattttgcatctcactcttccttccctgaacattttgctgctgcttctgcccacagctccagttcccactgcaagagttcatcctggccatgggcttcttcctggtcctggtgatggagcagatcacactggcttacaaggagcagtcagggccgtcacctctggaggaaacaagggctctgctgggaacagtgaatggtgggccgcagcattggcatgatgggccaggggtcccacaggcgagtggagccccagcaaccccctcagccttgcgtgcctgtgtactggtgttctccctggccctccactccgtgttcgaggggctggcggtagggctgcagcgagaccgggctcgggccatggagctgtgcctggctttgctgctccacaagggcatcctggctgtcagcctgtccctgcggctgttgcagagccaccttagggcacaggtggtggctggctgtgggatcctcttctcatgcatgacacctctaggcatcgggctgggtgcagctctggcagagtcggcaggacctctgcaccagctggcccagtctgtgctagagggcatggcagctggcacctttctctatatcacctttctggaaatcctgccccaggagctggccagttctgagcaaaggatcctcaaggtcattctgctcctagcaggctttgccctgctcactggcctgctcttcatccaaatctagggggcttcaagagaggggcaggggagattgatgatcaggtgcccctgttctcccttccctcccccagttgtggggaataggaaggaaaggggaagggaaatactgaggaccaaaaagttctctgggagctaaagatagagcctttggggctatctgactaatgagagggaagtgggcagacaagaggctggccccagtcccaaggaacaagagatggtcaagtcgctagagacatatcaggggacattaggattggggaagacacttgactgctagaatcagaggttggacactatacataaggacaggctcacatgggaggctggaggtgggtacccagctgctgtggaacgggtatggacaggtcataaacctagagtcagtgtcctgttggtcctagcccatttcagcaccctgccacttggagtggacccctcctactcttcttagcgcctaccctcatacctatctccctcctcccatctcctaggggactggcgccaaatggtctctccctgccaattttggtatcttctctggcctctccagtcctgcttactcctctatttttaaagtgccaaacaaatccccttcctctttctcaaagcacagtaatgtggcactgagccctacccagcacctcagtgaagggggcctgcttgctctttattttggtcccggatcctggggtggggcagaaatattttctgggctggggtaggaggaaggttgttgcagccatctactgctgctgtaccctaggaatatggggacatggacatggtgtcccatgcccagatgataaacactgagctgccaaaacatttttttaaatacacccgaggagcccaagggggaagggcaatgcctacccccagcgttatttttggggagggagggctgtgcatagggacatattctttagaatctattttattaactgacctgttttgggacctgttacccaaataaaagatgtttctagaca

SEQ ID NO: 448 - DNA, 73005 bp, Homo sapiens
  source 1..73005: mol_type = genomic DNA; note = NC_000004.12:c118353042-118280038 PRSS12 [organism=Homo sapiens] [GeneID=8492] [chromosome=4]
cctgcgccgctacctggggctcaggcccaaccgctccccgctgcgtccgcgccttctcttttccggtcctctccgccggccggggctcggctgagctccagatttccccacccgcggccgccgccaggggacaggagccgaggcgcggcagggcaccagcggcgggaggcaaggttggggaggcgagggcggtccgcgtgcgggggcgggagggggctgggggattcgagggacgcggcagccccgcccccgccccctcctcttctccgctccaagcccgagaagctggggagcatggaccagaccccgcagcgctggcaccatgacgctcgcccgcttcgtgctagccctgatgttaggggcgctccccgaagtggtcggctttgattctgtcctcaatgattccctccaccacagccaccgccattcgccccctgcgggtccgcactacccctattaccttcccacccagcagcggcccccgaggacgcgtccgccgccgcctctcccgcgcttcccgcgccccccgcgggcgctccctgcccagcgcccgcacgccctccaggccgggcacacgccccggccgcacccctggggctgccccgccggcgagccatgggtcagcgtgacggacttcggcgccccgtgtctgcggtgggcggaggtgccacccttcctggagcggtcgcccccagcgagctgggctcagctgcgaggacagcgccacaacttttgtcggagccccgacggcgcgggcagaccctggtgtttctacggagacgcccgtggcaaggtggactggggctactgcgactgcagacacggttagtggcctcggggcggccgcggaaactccggacgggctcggagccagtgaggcttggggccggcgtacaggtctcttggaaaaagtgacggggtgtgtggggttgtgggcttgcgtttgcgggctgtgatggtgggctgcagctgggttaccagtaaggtatactggtgctgcaaatctaagccagccaggtgtgcttgtgtgaaggttgtcaggggtgacagttctatgcaaggtgctgagctctgggtttctgaatttgctctgtcctctggccactgtgtgtgtgtgtgcgctcgtgtattgggtgacagtgtgctttgggcgtctgttctctagattagcttacgttgagtgggttaccatatttacattaaagaggcataattacttgttctggaaagggaaatgttacattaacgtggcaatcaataaccttccctccattctttagactccgatttttaaaaatgtggtaaaattttgccttaatttagctgttgacctctgttttaaaaagtatggcaaaattatgtggccaaaatcagccatattcacatactccagctcagtatggtaagtatcatcagtgactggaaaaaaagaaagggaaaagagatgggaatactactatcttggtgaagtagcaacttaatatagttatacacagttttccagagccattacttagctttatatgttttatcaggattagttggtaacatcaggagataaaggtggcaaaatgttttaggtttgtggtaataaaagcatcacactaataaatttaatgtaaatgaataatccagctttgaacattgcttcattttgaattgttgggattttgttgaaattaggtttttttttttgtttaaaaactgaggaagaaaaaatatcctcaaagtttgaatttcttttcaacaaaatatttttggcagctttccattcacactgtggggcaagggtttcctgaattgagattctgaatcatattgtactttgtactttttggaggtaacttggaggttatctgtcacaatgtcattcatttcctggagaaattttatttatcagtaccttcaattgcattagtgctttgagttaaggaaaagtgataggaaggttaagatcaattatcctttatcctcgggaatgaagtcatcgctttacttgtgtttcatgaacagaatgccaatgtagctataaaaaatttgaggtgatgtcaaacaaagagtgctagcattgtctcgttattcaccataagagattatagtaaaatcttaggtttagcaaacattgacttttttcatcttcatattattcttagttttataaatagataagagcagagaattattagagaatgaatgtgtaggagagaatatacaacttctctttaagtacataagcacagactcaagaaaagtaatttaaagttaaaaaatgatagtgatctgttgctctctttctgacataactcagccttatgtttcagacatggagagtaacttgtccttggatttcctgccacctcaccttcttcagttgactagaaatgtaaatcttttgaatgcctttatgttcctagctaactctcaccagacaaaatcccaaatactgcataatagttatttgtacttcctggagtaaagtgattgaacaaaagagaaacaaaagaaaccactcaagatgggagataaatgcccttcccaccaccacaaaaaaataggaaaacgatcaactgtgtaataatgaattactttcacagactcaatctcattctatcatttacttctccagtctgcttgggcataacctatagctttgagatgagtggcatattctgaacgttacggctctcttggtcctacatttcaattaggggtgtgaacaaaagtatcatggagtggtgaaaagaatattgaattgtgctttagaaaacactggtgtctgttttggctctgccagtagctgtgcactgttgggtaagactcttaactcttagagctttggtttcctcatcaggagaaacgcaagttttgagtaaattaatttaaaagacctttgcagcgctgagcatgtacgcaaaacaacctggcctgatcatagtagctaggacttactgtgcattcattctgtgttggatgctggactgaacattttatgtgcattttctcatttcattcttttatttttatttatttatttattttttgacaagggtcttcgtctgtcacccaggctggagtgcagtggtgcaatctcagctcactgcaacctccgcctccctggttcaagcgattctcctgcctcagcctcttgagtaactgggattacaggcacctgccaccacgcccggctaatttttgtatttttagtagagatggggtttcaccatgttggccaggctggtcttgaattcctgacctcaggccatccacccgcctctgccttccaaagtgctgggattacaggtgtgagccaccgctcccggcctcatttcattcttgtagcaaccttctgagtgagttcctgcattttactgatgaaaatatgtgaagacatattatgaggagtataggagaaaatagggttagatatgtgtatttttacttcacagctgattttgctgtatttctttacttacatatacacatgtagaaatatctgcattgtgtagtaatcctcattttgtagtttatggactagtctaacaggaagaaagggaattatgtttggcctgatgcacatgatttacagtctcttatgcttaaaagatatctggtatctttttctttgttttttttttttttgagataggttctctctctgtcacccgggctggagcgcagtggcgcaatctcagtgcactgcaacctctgcctcctgggttcaaacgattctcctgcctaagcctcccaaagtgctgggattacaggcaagagctaccatgcccgacatatttttttctttaaagaaatccagggcaaaagaaaataacaatttacagtaatgtgatccctcctttaaaaaatacactgctggccagagtcacatatttcattgcattgagaaaaatgaggaagttggtgtctccatggtgaagagttgattgaagccaagttgaaggggcagggtggggacctcaggtgagccagggctgggcgtggatgttccagtggctcagatgtcagagagcaggaaacatgatacctgggccctggttttatgaaacttgcaaattaatactaaagaatcattctagggctgggcgcggtagctgtcgcttgtaatcctagcactttgggaggctgaggcaggtggatcacctgaggtcgggagttcgagaccaggctgaccaatgtggagaaacccctgtctctactaaaaatacaaaattagccaggcatggtggcacatgcatgtaatcccagctacttgggaggctgaagcaggagaatcgcttgaacctgggaggcagaggttgtagtgagccgaactcacgctattgcactccagtctgggcaacaagagcgaaactctgtctcaaaaaaaaaaaaaagaatcattctggctatgggaatacactgaatcagcccagggagctggtctcattatgagcatttagaaacaccttgggacttgttaaaatgcagattcctagactgtagcccaggctctgagtaattctcagttctggatcaggaatggaacatgcatttctattgagcagtcaaagtgatttagatgctgaaaactctgtcacagtcaggcagaacacatggaagggcattagaacccacctaaaatgtatagtggtaggtgatgatatagactaactgagcccaccattctgtgacttaaccctgttaggctttaggagcaggtgtaaggcatgccaatgttaactttttgtgtaattttagaaatgacacttctggttttttatttgaccagtgtaagatagtaataacctagttcactggaatatggttattttatttttattttttgagacaaaatgcatttgtgccatctcagctcactgcaacctctgcctctcaggatcaagcaattctcccaccttggcctctgaagtagctgggactacagtccagctaatttattattattattttttgtattgtttgtagagatggagttttgccatgttgcccaggctggtctccaactcctgggctcaagtgattctcccgccttggcctcccagagtactggaattacaggcatgagctaccatggctgcccagaatatggttattaattgaatgtgagctaggttatttttgcatttctacaggaagaattaacaggcaactgatttcccccaacaatagcttgtgacccagcatggtggctcatgcctgaaatcgcagcactttaggaggctggggcaaggggatcacttgaggccaggagatagaggctgcagtgagctatagtcatgacactgcaccccattctgggcaacggagggagaccctgtctctaaaacaagcaaaacaaacacaacaaaacacgatagattgcaataacttagtgtttcctgcctaggaggggcagtcacttttctagtctctggttggcatagcagatggggcaacttgcttgacactgtgctgagagcctcccttttttacaagccaaccataggtggctgatgattgagaggtaaaacattaaataaatgagaaagttttaatcattgagattctggaggagaggatgagtcaagagatctgactttttgtcttgtcatgctcctctgttcatgtgcacctacccacccaaaatctcttgattgaaatagagatagaggacatgtggaccaagtactattgtttacaggctgtactcattgaattccatctgttgtttgtagtgagtgttaattaaaaagttagctgaaagctgtcccccgccacttttaagggctacatcttggttctatgtagcaggtgctgaaaaacatttattagcaataccagatttgatacatttcctggttgattttaaatattgagctcaatctgcttttcagactaaggcagatgtcaaatacttagatttgggggcattatctgatttcttaactagtgtgcatatttttttttttttagagaagacaataagatatcccgttactattgccttttatgagctattgtccaggggtgtatatttacttatgtggtcactgtctgtgtgtgtgtgtgtgcatgtgtgcatgcatgcacacgcatgtgtgcgcctatgtgttaagacaccagtccccaacctttttggcaccagggaccagttctgtggaaggcagtttttccgtggacctgggggatggtttcatcaggcattagattctcataaggagcatgcaacctagattccttgcatgcacagttcgcaatggagttcgagctcctaggagaatctaatgctgctgctgatctgataggaggcagagcttaggaggcagagctcaggtggtaatgtgagcgatggggagtggctgtaaatacagataaagcttcacttgctcacctcctggtcacctcctgctgggcagcctgggggttggggccccctgtgataagataacctatgtaaaagtaatttggtttataactgaagggaaaatgaaatatccagtaataaggtactactcacaggtacctgcatttgatggatattatgcagatactaaaataattattgtaaatattatatatatatatatataaataggaaagtgtttacgatagtgtttaggggaaagaagggtatgaaatttatatataatacattatgactgtgaaaataaagatgcttttggaagatttggaagaaaacatgataattatgaatttgggtgtggatgtgtcttgaatcaatttgggtggttttgatagcaaagaatagaaaacggaaacaataaggaggcttattgttcctattacaagaagtccatgtgatgggcagactccagcatggtacacttctgttcctctgctactttcttggctcctctatcctcttcagaagcgtggcctttattcttaggctggtggttattccaggcttcacttagagatagaacaatctgcagaaggaagagagcccctctgcaggaatgtccttttgaaacaaggaaacctttctggaatttcccccacagacttccacatttcatttgcccagactggatcacatgttccttcctgacactctttggaaagaaatgtacaattaccatgattacatagattagttagcttaacctctgaatcatctggggattcaactggcaaggaggaaacaaggtagttgttgatcagaaccaaaagggtttgctaaggagtatggttgggacttgtccttatatttgggaaacttaatgcaattaaaaaataacagtaagtaatttataaagtgctgtaaaatgttacattcatttttttttagtcatatctggatgaataacatttagactctggtttggttgacaaagcatatttccttgtcttaagatgctatttgcaggcaaatattatgacgcatttatatctgaaatgaataattccataattgatgagaatgctgaagttagttcatttattaagtaaacatgattatatgatttaattctaattttgaaggttttttccccctgaattaaattttaaagaaagcagtcctttgaagcctctctccttagctgcatagtaaataggcattatatgaacaattgatttagactgatgtttacatggttggtctgttgtcattagaaactaaagaagtgtttatttttgcccctttagcatcttccttttccagggcagtctcctcttcccctcctcctccttcttacaaatcagtgcaacaatattaataaaaaaattattgtatgcaaaacactaaagcaatgatatttacccccctacaagccacacatgcacatttagcctcagtactttttattaggatcagcagaggggatacaaagtgtaatgctggttcttctaacagggtaaggataggtttcatttattccttaaacatttactgcattcacactaggtgcagcatttataaagatgaatcagaaattcacctttgtcctctggttgaggacagccattttctgggtgaggtgtcagaagaataataagcattttcattaccttccctgtggtgcatgatctgggagacaagaagattattgtttggtttcaatttcatcactcactgctatgcaataaaatggtaatacccataccatttgtttatgtgtagatggtctggggacacacaatttgtgaaagcttctgttgaggttatatgcatgtattgttagcctactatagcttaaccatggacagagtcatctttttttgtttgatatcatataatgttttaaactaaggaataatttataagatttataaatttctaatcagcacactgtaaatgggtagaattgctaacttaggggatgcactctcattttgaactataccaactgattttttttctcagcatttaagttgttgtatacatgaataataaatgaacaattagtatgaattatagatgtgaactaatggaggcaaatatagctcagttggatcttggttcaggggaatgccttgtatgttaaaaatgatttgattcattttgacctgggatgacttgaataaaatatactatttagcaaagatatagcaggtttaattaacaggtaaatataattatagatgaaaatagtataacttagtactgtagaatatagtgaagaaagaaaataacataaaaattaacctagcatcccctactgtacttgaaaaattcaaccaagagtcccccaattcagttgttttcaggtactgtaattttttaaatatattttataattgatagagaatggtcatttagtatatttttatagtgttgcatttggtataagacatagtattatatttaacttaatgtcaaatatgtgtactaaattgttcaacatgtaatggtttttttctattcttttgaataggtcataaattgaaatttctgtatcactcacagctttaagtgtactttttgtcaaggatctgaacactagctggatgttgccagtatgcattctttctattccactagaacaatagaaatgactaaaactaattattttatgcatctgtaaagttcaataatagacaagaaaggatttgtgtgaaaacgtgaagtttttttttactcttttatcaaactgtgattttttaaaaaaagattttaaaaatatttattactagttttattcagaaaacactattggggtgggtctttgtttttactgcattttctttctctttaaattaaggaatgctattttataagtacattttaatgaggggttaactaaataggcaggcatgcattttttccccccacagggtctttctttgttgctcaggctggagtatagtggcacagtcatagctcatcgtaaccttgaatgcttgggctcaagcgatcatttgcctcagcctcccaagtagctgggattacaggcctgggccaccacgcccagctaattttaaaattttttgtagaggtggggtcttgctatgttatccaggctgaacagggatatcttttcatttgctttattttggaataagctgggtatatagaatgaagatagttgactcatttggttccttttctcctatttcttttaggtttccttcacatatggaatatggaaaggaaggttgttttgcttttgtttttgttttttgttttttgagacagggtcttgctctgtcacctagactggaatgcagtagcacaattatagctcactgcagtcttgaactcctgggtacaagcaatccttccgccttagtagcctgagtagctgggactacacacgtgggccaccaagcccggctaatttttaatttttttttttttgtaaagacagtgtctcactctgttgtctaggccgatctctaaccccagggctcaaacagtcctcctgccttggcctcccaaagtgctgggattacaggtgtgaggcactgtgccttgccttagtcttaaatcttaaagctcagaaaccaatgagacttgtgaagggaatttttatccagtctgctgttctctagtttacctgtattgactgagactgataagatggttaaagagaactcttcttgaatgcctgtccctctatttggggaattcctgttttctagcgaagttgtccatcaagcaaatttctgttacatgaaccttttatgttttctttcctttataaaactggaggcctatgtacttagaaggaaaacagttgtaaactattttactgtaaatgtttaacagttaaacatttttatcaaggaattaagatagtagaattctgaacattgttgtacattggaacattttgcctttaaatagttataacaccagcagacagttgacctttttcttttttggtagccgttcatttcaggaactctggggcctccactgcatgacatgccatcacgcatagtggtacaattccagactttcttcctttactagtttggtctgcatgtttataatgcttaatataattgacctaaaacctctgcttgagactttaaattattattcttaacgcattttaaagatagaaatatgtagaatagaatattttctgtgcacgtggcacttgagagactttaagacagtgcaacgctggatcacacacactccggtgtggtccagggacacaagctctgactagagtatcgaagaatggttggttgctctaggagaatgtgggcggaaggtgagggatcaattcttgataataaaaaattggacaattgaacaatatttgccaaacaaagaatttcgtctacaatttatgcaaatcactttattgttaggtacagcaatagaaattagttcacttggttagctttgggctttgcggatttctttgagctaaggttattttcctttctccattgtgtaattgtgtacctatacatttgtgcaaatgtgtacacccacacgttcatagtcctcctacaactttgtacagctgtgggacaaatcagcttctactggaggatttgcgtcaactataggagcaccagaaagccacttctctcctgttccacggtgtaaagaaacttcaggctactttatgcttctcttcctagttggcttatttccatacaagatttggtggattagttgcagtattttcagtaggatggtgaactctaacatggtataatgcataaagtaatatctgaagttttgaaaggtacttattgtatttcagggtctttgcttaagtttggaggtagaaggtcagtaaccagggcagggaactaggagatagttgatcatggctctgtaactgctcagttgctttggtctgtagctttttcatccataagtagaaggaaataagttatagttttgttgttgttgttgtggttagcttgcttttgagatggagttttgctcttgttgcccaggctggaatgcagtggtgagatctcggctcgccgcaacctcagcctcccgggttcaagtgattctcctgcttcagcctcccaagtagctgggattacagccatgtgctaccatgcctggccaattttgtatttttagtagagacggggtttctccatgttggtcaggctggtctcgaactctcaatctcaggtgatccacccacctcggcctcccaaagtgctgggattacaggcgtgagccactgtgtccagccataaattatagtttttaagatctggaccacctcagcttttctaagagaataaatgcagcaataacaaaataaagccagaaaacaaatgaaaactactacttatcttaaatgtatatagtgttgggtctcagaaaatgatatcaccaaatgaaggcctcagaagtagtctcagaaacaagttttcctttgatcttttcctactttcctgtcactggcccttcattttcccctgaggctagccgcagaaactagaattcctcttttccaaggtgggccatagacaccagaaccccttgtttccacaatcagccataaaacctaaaaatattactcaactcccctcatgtcccagctttctgtgtaaaaactggccttaaaaatttatctgacctaccttgtttgattacataagacccccattccagagagggttcttctccatacccagaaaaaaacaaaacaaaactcaaagaggccaagaaaaatctaaactgataagccttactgggtttccccactcagtctattgagattagatcctacccattttgtccaaacatatttctacgtggctgaccacactttgttaaacctgaacataaaaatgggcagtatctcctatagctttgggtcctcattctaaaggctcccacgtcacgtaaaaccacgatcaaataaatttatatgccttttatcctaatagtatgcctcttgtcagtgaaccttcagaaggcagagaaagtgctcttggctcctacaatagaatgaatcgtgtgttcaaacttttagtcttttagagcatatttgaatgctgtttttaaaaaagttgtttcaaataattattagaagaattgagctttatagaatgatataaatactcattctgagtcctaggtagatggtttcctccgaatagacatttttatggcccttaggaaaggataaaccatgtggaggacactgttaggaaggtgtgtgttggggctggctgtgcctggagtggaatctgacatagaattcattagtcattgacatgcaaattgccttttaagaattgcaaatatttgtcttcatttgttaaaggaaaattggatgagcactgcacatttcttgccatatagcagatactgctaaatgaatccaggctttcacagtgtgcttggagcgttagagaaaatgatggtgcagctgatagttgacctggaaactatttccagctctatcattgctattatattgttatggtcataattatactttactcaggattttctccttctcacctctaagtgcctcaatcatttagattcatgtgtacatcatttcttcttgatagctttttgatgtagacactattttaaatcttatgatcacttaatgtgcataagtacacatttcgtttgttttcattactagaactatcttccagcccttttgacctgagtaacttcgtgattaaggggaggaattagtaaagaaataatagattaaatatcagttcaaataaagtttgcttgaggtcaacaaatgaattctttgactaaaataaactgctggcatttgtgatgtgcataatattacgtggacctctgtagaagagattttgtgatataaaaaatcattaaagatcagttgaactcttcagaaatacttccttaaaaatattctgtagttcatacttcactgagctaggcaggacttcctcttgcttactgtgaattaaagaagtttagaatatatgaatgagttttagatgatttgtcatatgaatgacccatgccctgttcattcctgaatagtcaggatttggcagtactgtacaatgctcacctccatttattattgccttttgtttgaattaaatgagactttgtttttgtcgtgagaaatataatatgtttttcttaaatgcttacatttttaaaggatgatgatgtggaaaataatagtggtggatgactaagcctgtacaaatgaaatgaatggatactttgtgaatctaatatttttggaagttattatgaagccatacataactttgaaatatgcaaattatgctagattttttgggtaggattgattttttaaattaatttcttaattttcttacctgtgaaaggccattgtaggtgattttaaacagaattttatgcaattcttaagttgtctgaggttaattctgtctctgctcagttgtcccacttgctacctcccagtgcctgctctggaaccagtcccaatgagaagaggaatgtaggtctttgaaccacacttaaggaataagaccaaagtgttatctttcctaagggtgcttgaatttaaatcttggctcttttaaagactgaaaggaatgacttaaattgtggactttgggacagctctttgggtgtggtatattagaggaggtgagtttccaggggcattcaattatacatactacctagtggctatttttccaagactagcattaggcagtattttcaaaatgaagattatggacataatcttcagaattttaatgactactactgaaagttaaaaggggaaaacacattttatttttccttagtggatgaacaaatcaaatggaagatataacacagctaattacagctaattcatatgcagaacatttaattttgtttctgtgtttcttattgatgacctcatgagaagaggaaggtaataaatgataaaaacttcatatgtgatgtaatctattatttgagatacaagatctgatattagtcattcttccactttttccccctttgaaaattacagtggttgcttcttgatgaggagatattggaataaagaaaaaaattataataggactgtctgtttgcctagataaaaaagaaaatataattagcattgacgtcaggatgttaattacaaaaaagaaggagcttgctaaatcctcacttaaaggaagaaacacatgccacacacagtggaggctaaatcattctgcctggatcccttactacttaagtttaaaaatcatgttaacccaggactggctcaatatgttcaaatgattatttactattaaagggttttgggattcttttccactttaggatcagtacgacttcgtggcggcaaaaatgagtttgaaggcacagtggaagtatatgcaagtggagtttggggcactgtctgtagcagccactgggatgattctgatgcatcagtcatttgtcaccagctgcagctggggtgagtgtacccatccctgaccaaatcagtcagctagtatttgagaataatgctgggtgcccgtcattgctttgtaaagcttgtatctttgtttcttactgtcactttcctcattctcacttttcacaaaagagctataaagaaagggccccaaatggaagaaatgaattctctcacatgcaaatgtacttcacatattactatctgggctgaactaggaaaatgggcaaatactaagtgggcaaatttaaaagcatcttttggtctttgtctttaacaaaatacagaggcctttgaagcaagttatgcctttacaaattctaagaatttgattctaaaaattataatttcttagaattataatgaattaattataattattctaattattaattataattaattaattagcacagccttaacttgttgttgtcatttgattttacctttctacttttatccacccacaagttccatttgtgtgtgaaaggggcaatgtttacctgtgcccttgtccttgatggggaagtggtgatgtcccaggccttaggttttggtgctgaggaggtcttgtggaagatggcagcttctgttagctctggcagtgtcctgctgtcctgaggagctgtcagcctgggaactggctccactgtaaccctaggcactgtctttacgacaagtcagtgtattttgaattcatcagtcccagcatctttattccttgtgccatagagtttcaccaggagcagaaggcttctttttgggacaacaggttttatttttgtttttcttattcttttgtttttgtgtctcctttatattttctaagcgcacttaacatatgttttttcttggcctttatcaccagaggtctttagaaagcatggaaatattttgttattaaaaaaatacagtctaaaagactgaaaaagaggtttgcagtttgcaagtattttgcattaataatcagagtggtaatatgatgacacaaaatgaagaagtagaactttaatttaccagatttctcttgtcttaccactaggaagctgaggaatgagtattgaataaaagcaaagcttgaaggcctaaattttgcttagatttttgatgctgttagagcaataaatagggttattatagtaaattaaaattaattattttgatgagttgatataaatcaggatgaacgaaggagtaaggccagagcctataaagtgttatggtgcttggaaatgttaattactgattttatcatgaatacttagtctggcaaacagacaattggcaagtgggcaggtcacaaagaatgatgatttcatgctttttcctttgaggggcaagagatgtaataaatttgtaggctgatgtcaatgtcttcctttatatacatacctatttgtgcttttattaccccggaaaatcagaaaggaataaaattttctgtgagatacaaagaaacaagaacgctatagtggaggtgtgaactactgtgtggtttattagtcttttgattgatgaaagtatgtaaactattattctgcaaacaaacttcagataagctgatccagctgcttatatagtatcatctctcagtagtccatttaaaaaaaaaaggaattgcacgataaaatcagagaaacccagctttattgctgtgaagacacatttacattttagatataccccaaatatttacagtttggttgatggaatgctgcagcatggagacagttgtagagattaccatgttaatcagataagcatttcaccttttttaaaatttaatgccagtttgtacacagcagaggttacttacaaaaatatgtggattagatgagctaaaagcagaacccgtctgtatgctattattttcattttttcttttaaaaatactctcctggtgttaggaaagagatgcatgttgctatgttattaattggtttcaaaggcttgctagcaaatactatatacagtgtaaggttttaaaaattataaatggattgcctcccgtgatattattgtgcttagatgtagtaataataattttgaaaatgctagcctagaatgttagagtcagaaagaatcttcaagcatccagatttttcttttgacacattagaagacaaagccttcgagttacttgcagcttggcatgacttttagctgagcccagactggagtccaagcctcactgaagctcgtgacacacctcttgcacacagccttactttttatgtctgcagtacttggccattttcttctaaatcagtcattggtggtaaaggcacataaagtagttatttaagattgatgaaaagaattccataagtaggcaaaccacgttgtgatctgatgttttgatttccttgaaactgatgtagtcttttgtgtttttcttctttctttctttgtttcttccatattcatctttgttgatttcttccattttttttcaaatccaaatgttttgataaaaagttttgcctacatttgataaacctaatatcgctcattgtacttccagaggaaaaggaatagcaaaacaaaccccgttttctggactgggccttattcccatttattggagcaatgtccgttgccgaggagatgaagaaaatatactgctttgtgaaaaagacatctggcagggtggggtgtgtcctcagaagatggcagctgctgtcacgtgtagcttttcccatggtaaaaaaaagaaaaaagttctgttgttttactttcattatgttttaaacgtgattccagatgatgaaagtgtcttagttataatcatttccttaaagactttaattacagaaataagtctgagtcaaaatattttaccatctaattagtcttcaatatgagtactgttaatttgaattccatttgattttccagtggtatctcatttttaacatattttctattttatataatttgcttaaataaatatgtatattctataggttatatatatactgtataatatattgtatatgaaacacatattttagtcatggaaaattatgatggaatcaagctggaaaataatcatgaaagtaaatatagaatacagcaaatacaacaaaatattttcactttgtgtaatgcaatataattatggcatcagtgttcttggggctgtagagagcaccttccctaaaaatggattgttggcttgaatgagggcttcttccaagttccatagagtaggtatgtggtaattatcagtatgggttcagtgtacagatatgtttatattcatggaagtagaggaaggaacaactgcctttaagatggtgaaagagttttctgggtaccatggtgtattttaatgaatgatcacaacctgaagccaccatactctcatggtatccctttttgcattttccttggtgatagcagcatgaccagatatcccaggacttggaatggtagcagtcagcccagggcagtggtttttgtttgagtacaagtatcagggggaagaataaggaagctcctaccacaaaacagagagacccattttggagtaattcctctggattggctggaagagccaatggagggatatagtccaggtgtatactctgagagctataatccttttttttttgactgggagaggcatatgttaaaccttgatgtcttgtaagttttcccttttcttcttttggttctctacctttgggtaatgctacttttgctaaatccaatgctgcttcaaggatgatgtgaactgggcccaataatttattgctgtttgtagattattggttttactctatgctcaacctgattgataaaatgtttttcaagtagtaaagtaaaaaattttaaaaataattataattttttttcaggatatctatctacattttttactccttccaccttctataatctattcatctgtttatattctggttgcaaagataattttatggtcatctataaacatatataaaatatagaaagttatgataaattagaagtgagaatttaaaaagattctctcgtggtagattaaatgagaatgtggagttgtatagctgaaatcagcgaacattgagttcaccttaagggatagtgatagatctttagtatacttcccttaaatttgggaattacacttagtgtcttgtcattctgtacttgtagcttttccaacatttcaaagtagaagattgcatgcaacttggatacaaaaaatagcagcaatctaaatgaaaacgtggggagtttaattatctataagctaaatatgagtccattgatttactgaattttctttcaaatgagttttgtgtttgttggaaggatggggctgttaactaaatcttgtccttgtgcttttctgtattttttatattttaacagtcatccaaaaagaaaaagaaaccacattttaaaataaaacacaacataggaaagtgaaaggtggttatgccataaactgtctaggtcctagatggttttcaactttctcttaaaaatttttgtttttctgttttctccaagcttaacaggtggggaaaaatatattaagaaatgtatacatgtttttctgtattttgtaagctttttaaaggaaaaataaacatcataatttgtgagaattatattaccatcattcagccatatatattaaacctgtctttatccattaacaaattgtaagtgctagttaacttatgcaagtaaacagtatatgcagatagtcactaatctaaatttctgctacaaaactcaaatatgagtgcttactttggcagcacgtgtacaaaactcaaatatgatatttgaatttaagtgtgaatatccaaatgccgtttactgactgctacaactgtggaaaattagaaacatatttcatacagataaatgattagtatttggcaaaaagtacaactagacttcatattagaggaccaacctgttaatttttaccatattacgtcctttattctagtaaaattagactgctttactctttgccagacacattcagctttgtgcttctttcttttgttcataatgttcaagtggcctgaacatgcttccctcatctctgacttccaaatcccatctatcttggccctcttaaaaaaacagctttttcacaagtgattccctaagtacccccaaccatgagtaaggtcctttgcttctgaaccactgtagggttttttgataatctcttgtctgtactccttttatcgacgcccttaggcagtaaacttcctgagggccgggtctgtctggtgtctcttcgaatgccctgcagcactgatcataacaccttgtacaaggcatatgtctgatatctgtttgttaatcagaaattaatgaatagatgttgccaattattttttcttgtttggagtgtcttttctaggtttatttagcattgcttgtcagttgaggcagtcaataaataattattatatgcctctgtatactaggtacctgaaatacataggtgtaaaggaacacagtatttctgtcctcattctagccaagaggagtgagacaattgacatgtaaacagtaaatcagtgacaattttagataaaagtaaatactctcaggaagacaaaattaggcaatgtaataggaagtcccttagtgtgctgtcttatccagggcagagaagagacagagaagttcacagtctgacaagggctagatcagggctgtagattatgagacggtagtcacatttgatggtccttatcagcgaaaacggatatgagctgattcatgcccaaatgaagtttcaatattgttctgttgaggtactggccatgatgtccagcaacttgttttaacgaattagatattaactttgacttgatttctacaaatgcatagataattctatactgaaaacaagtatgttatagacataagtgtcattcttaataatgacatattggtaatgctcaagttactgtaaataaaaaaaaatcaatgccaccaccataatactatacaaatcaaacacatttccagtaatgcgcagcttttgagtgtgccttttctagtttctgaggttgttggggaaaagtgaatttaaacacatttcctcctaagagttacttgtattcatataattcaatttgggatattttaattggccaagattaccataatatattagatatatatacgtatgtccatatcactggtgtggctttataaatattatttaattattgagaatggcaaaaaatatagaatatacctaatcttatcaatcaatgtaaatgcataggttttgcttatttttaacttcacattgcacaggcccaacgttccccatcattcgccttgctggaggcagcagtgtgcatgaaggccgggtggagctctaccatgctggccagtggggaaccgtttgtgatgaccaatgggatgatgccgatgcagaagtgatctgcaggcagctgggcctcaggtttgtttttactactcttgttttgcttaaacttttgaatcttattatttccatacccaaaggcaggtgctgtttgtttaaattgcacatttccttgaacaaatgggacaagttaccttttgatctttgtagtagggctgtaggcttcctgaagagcagttaacgtgtactctgtaggtttaacctgcttgtgtctgaattaggctgattttatgtcactaagaatctaagcttttattacttctcattggtagtctttacgttactcccaggtagtaaccagcactgtaaactatagtgacttaatcaaattccatatgatgaaaaactggttgttagcttgtaactcaaatttaacttctagtcatgaaatgttgtctaaacttttgaactgcacttccttgttaggtatgtgcttagaacaaaggatatttattaatgtacaaaggagataattcccctgtagggttggaaaggaagcctatgtcatgaaaacagcagtctgaaaatcaacattccaggttgcctcagttgggattattctggagtattataattttaggccttctaatccctctgtttagtgattctgaacattggtataacaagcctgaaagtttctctaaaattatattgggggatcttttaaaagttaatcattttcttcagattttaaaaaatatttcatttagttaatcatttactacagaatttaaaaatatttcatttagcactgagggggccaatgatgggaggcctgttcttccctgttcattgtgttcagttaaccataatccttgactggagcatgattgttgaaccttgaacaatttttacagttcaatttttttgtaatttttaaaaataattggctctctttcaaaattctatgttatatttgaagtattttaaagtaaaatatagacactttaacactttgtctataaacacttcagcatgcatctcttacaaataagaacattgttctatgtagccaaattatcattatcacaactaattattggtaatcatttttaatattgtctaatacttcatcttattcaaattttcagagttgcccctacagtgtccttggcagatggcttgtctgaagcagaatttagtccaagaccaatctggatattatgttccttaagtgtcttttactctagaaaggcctgggttttttgttgttgctgtttttttttggtttggtttggtttttccataatgctgatttgttgaagagccaaggccagttgttttggagactgtcccatcttctgaatttgtcttatttttttccttctggtgtcatttagtttactcttctggttcttgtaattcataaaattagagtttaggtttaaaggcttgattagatcaaagcaaacattttgtctggaaatcatcacaggtaatgtattctcatcttgcatttcaccaggagtcatgaaaagctctagttttccccacaaatgaagctgaaattgagcactggtttaagtgacatcagcctgatcctttactgtaaagttagatttccccctgaaactgactatgggacctaaatgctaatttatagttcacatgtgggacaagaacaaacacagcagatcctgtgtcaacaggttttgctgtgattactggcattgtttacgatggtatgatcattttctttgggttggttaggaatatggcatcttggtttcttttgaaaaaactaacaagtacgtttatgagacaagattttttaaaagtgttttgactgggtatcaatttcacgagcaattttctcaaagtttcccggtgcctgctgttggagtcagcatagcatatgattatgggcgtgtgttctggatgctgaaaaacctgcatttaaatcccatttttggagttgcgaaaagctacagaatatctcttagttgcagttttctcatctataacgtatttcttaatttatagggttttgtgtctacaagcagttagcacacatagtaagtaccatatacattggctatcaagggcactctaattaggtagttatattttaaagatgttgttaaacatctttattgtttacattcaaagtaaccagcatttggtaatgacagagcaccaaacactattcctccatctggaacttctatttagttagctgtatctatgaacttctatatttttaatacactctaatgtgtacatatatgtattcactgggttatcagttatgtgttcagtgacgtgctaattgattttcatgtgagttactaagaaacctatgtctttgccaaaaatattaagaacttttagggtatagtaatagcatttttaatattatcagttacaatatgggttattctaagtttaaggtaaaaggcatttttgattattaatatatttgtgggtaaaggcaagcttttgttgcttagaaaaatccatagaacatttaagtgacacactgaatattagttacattacagttactgaagtgattccaaaaatccatgttgtggccaggtgcagtggctcatgctttaggaggccaaggtgggaggataggttgaagactagcctgggcagtatagccagatcctgtgtctacaaaaaaatttttttaaataggctgggcacggtggctcacacctgtaatcccagcactttgggaggccgaggtgggtggatcacgaggtcaggagtttgagaccagcctgcccaacatggtgaaaccccgtctctacaaaaaatacaaaaattagctgggtgtggtggtaggcacctgggatcccagctactcaggaggctgaggcaggagaattgcttgaacccaggaggcagaggttgcagtgagccacgattgcaccactgtactccagcctgggcaacagagcaagactccgtttcaagaaaaggaaaaagaaaaaattagccaagtgtggtggagcacaactgtagtcccgactactaggaaggctgaagtgggaaaattacttgagcccaagaggttgaggctactatgagccatgatcacatcacggtactccagcctggatgagacagcaagactctctttctaaaatataaaaatagaaattcatgctgtaatgtagagttctttttttttttgttgttgttttaatgtagagttcttccttgagacaaatatttttttcacttaaatagaaacagtttttaaacaaaggccatattgacaaggataatcagttacctagaaaaaatatagagatagaatcacaaggaaggccatattaatgttgaacacactcatgggttaagtaaagtattaacgcctttctcaaacactagctcattgctgcttttcctatgaggggattctttggaaaagtgattaaaatatacaagcaaaaatcctccacaagcacttgtaacaaataacaatccagctttatagagatttgtttttattataagtactctgatgctctgagctgacattcttcgtttacttttcttgcacttgattttatagttctctcataagtttgcaataaagcagtactctacgactcttctttctctataatttgttttgctcatttaaaggctaagtactttcagatgaggattgttttttaatggcacaggattgatagcagacacataattgttgcttgtctcaatttatgattcattcttaagcaaatttcatctcagttttatctgccttgttgaattcccacagggaaactacatcatgcttttctggagtagtggttacagtttatttatgagatgctgtcattgttaaccttcatcttttaatggtgtctgtatattttggtagctggcaagcttcctaaatacaaaaggaattattatacttaagatacttaaatttgattaacccagaacatggagaaagatgagcagcgggaaaggaggcagccagatgttagaaaattagataacttgagaacgcatatgtacccagtgaagtttagttggagacattttaactgaagttcctttttatgtgcttaacattaaaagcactttccatgtctttcaaaaactcttaaaagcatagctttgtactgtgagatcatattttattttgtggatgtgccataatttacttgggaatttaaaaattgtggatactttctttccttttagggtgctttcatttttacttttttgctctaaaattatatagaaccatattattgagtagtagaatacaaattcttcccatataaattactctttaaaaattgttttttgccaggcatggtgtctcacgcctataatcccaacactttgtggggctgaagtgggaggactgcttgagcccagtagttccaaaccagccttggcaacatagtgagactcccatctctacaagaaaaaaaaaattagctggttgtggtggcacgcactggtggtcccagctactcagaggctgaggtgggagaattgttagtccaggaggttgaagctacagggagttgcagttgcaccactgcactccagcgtgggtgacagagtaagaccctgtttcaaaaaaaaaaattttttttctttgctcttttattttacggttcattaaattttaaaaaacattgtataaaccaagcttgtccaacccacagcccgcaggccatatgcagcccaagacggctttgaatgtggcccaacacaaatttgtaaactttcttacaacattatttatttatttgtttatttattttagatcatcagctattgttagtgttagtctattttatgtgtggcccaagataagtcttcttcttccaatgtggcccagggaagccaaaagattggacacccctggtataaactttacaacaaagatagcctggtatatggaattattgagcaggaaagataacttgtttaacagttgaggaagttaggcccactgagattacacaatattccccaagtctgttagtgggaggcagagtcttgaggtttatggctcccaatttaggattttttctgttatgttacattatttgtaaaatggcgaggtgttaataagaataaatacaaatatagggctgaaagaaataaggaagtcaagagagaaagttaaatttaagaagaaaatgatagtgaccgtgttttagatagactgtatttgaggtgccatcagccatcaattgacagcgttccaggaggctgcaagaatgctcagtgtttcggtctgctctgtagtcagacaaactttaccatttagtagtagtgtaatgttggacaagttatttaacttttgagcctctgtttccttatcagtaaatttggtataatagcatcattcggttgcagggaggaagaaattagttagtatgtctaaaagcactgttagaccagtgccaggcatgcaggaagcatttgatacacatcaaacatcattattggagatggcggggattgttttctagagagtaatctaggatattaaaaatgagttttttcatccatggattacaaactctgtatatggcacaaactgataattgcagttaaagagccaatcttttataacctaataaataattatgttgtacaatagaatggcctaactctattctaggtctacctcaaagcagtagctaatcctggggattgagttaatcagatggtgccatttatttggcctttttctgtgtatgtaagggggaaacaaaagcaaaaattttgtattaatacaatttgattagctaaatttagatttaagaatgttttgaatagggattggaaatagaaccagttcagtaagtgtttattgaggattgctgttatgtaggtcaaatatctttacacagaaaataattcagggtattagatcagagtatctctgcccaaaaatttatttacagattatcagagggtaaaaaactagacaacactagagcttttattacagatgaactgctggggctggtatggaaataatttccatgaaggacagagaacacacagctttatcaaattcacatttacttgaacagttcacgagtttttgttgatttcctcagtattgtaattcatgactctttaaaagcagagtcatcaattattttggtattctcttgaaagccagcatagttctgagtaccaggaaatgctagtgactggctgaagcaatgtgtgaatatgtaaatactgttttcttaacttaaactaaaaagttagccagaaaacctgattttgtgttacattatagtttcctggttaatgttttttgttgttgttctcaagtttattctgctggttattctgattagtttattttaaacatttttgtatcattaaaataataaacatacagaaatggatgagaagaaaataaaacacccaggtagtgttttttttttttttttaattttcagcttttcatgggtatattggacccatgtaatgagcatagtacccataggtagtttttcaacctacgtctctcatcccgcagtagcctgcagtgtctgttgctctcacatttatgtccatgtgtgttcaatatttagctcccacttataaatgagaacatgtggtacttggttttctgttcctgtgttaattcacttaggattgtggcttccagctttgtccatgttgctgctcatcaatggtggattagataaagagatattggcatgtgtataccataggataccatgtagccatgaaaaagaatgaaactgggctgggcgtggtggctcacgcctgtaatcctttgggaggctgaggcgggtggatcacaatgtcaggagttcgagaccagcctgaccaacatggtgaaacctgtctctactaaaaattcaaaaattagtgggtgtggtggtgggcgcctgtaatcccagctactcaggaggttgaggcaggagaatcgcttgaacccgggaggcagagattgcagtgagctgagattgtgccactgcactccagcctgtgcgacagagactctgtcttcaaaaaacaaaagcaaaaacaaaacaaaagaatgaaaccatgtcctttgcaccaagtggtgttttcagagaggatttaaaaatacatagcatccccagagtcaatgtttggggcttgtactctcttatcttgtaatctcctttaaggaacgggccaagttcaaaggcaattaaccagaacttttgctttttccttgaatgtgtgtcatgtaataattaatgtatttgaaacacaatatacttcagctcccctttctcagcctatcagagtattctcagccaaagcatgactttaggatttgttactttttctagggaattaaaaagccttcagttgcttgtctttttgcctaaaaattgtatgaaagttatattaatattttaaatctccaaaaatgtgataggtaagcatgcattattgtttaattttaccactagtgatcttgagcttcttatcctgtggtcattggccatggatattacttcttctgtgcatagttggatcctctctattgtctatttttttaagttgattgctttgtcttttactaaaatgtgataatatcctagcactttgagaggctgaggtgggcagattgcttgagttcaggagtttgagaccagactgggcaacatggagaaaccctatctttgcaaaaattttaaaaattagccaggcatggtggcatgtgcctgtagtctcagctactggggaggctgaggtgggaggatggcttgagcctgggaggcagagtttgcagtgacccaagattgtcccactggaatccagccttagtgacagaaccagatgctgtctttaaaaaattatctatctatctagatatatatacacacacacacacatatttatataagtaaactgtaactgaaatgtgtgtgcatgtgtgtgtgtgtatatatatatataaaaaacaagttattactattattcatttctaggagtttttttttgcaaattgcaaatgtttcttccagcctattggtttgcattttgactctgattatggtgtgttctgctgtatggtagttttcaatttgtatgtggttgaatttaacttttttggtttttgttttctgacttctgggtttcctaggaattctctcttacatccaaggttataaaaactatgttcctatattttagtctagtaactttttagttttcttttctttcttccttccctccctccctcctcctctcttcctttttccttttgcttctttctccctcccgcctttctttcttttcttttttttccacctatatttaagccatctggatttcatctttttgttatcactttgggatcaaattttatattcttccgtattggtctcaggtttccttatagcacctaatcatggctcaatgaattatacccattgaaattttccttaatagattttttttggtggcatttatctcagggcaaagatccaagaaggctgttaatctgcctttctctagagctttcctatctggcttctctgtcagtgatcctgtctcctcctgttttgtccttcaactctcagtgttctctaagtcagtttccatatttgctttcattaatctctttcctctagagcaggggtctgcaaactttttctgtaaagggccagagagtaaatagactttgcaactacccagctgggccattgtagcatgaaagcagccatagacaataacttaggaattcgtgtggcatcattccaataaaacttggtttctggacagtaaaatttggatctcacttgatttttcacatcacaaattatattcttattttgatttttttttcctggcgtttataaaattgaaaaaccactcggctcacaagcaatataaaaacagatagcatacctgatttggtgcacaggtcatattttgctgacctctcctctagggcatagggcttcttctctcctatcctgtatcttccctgtaaaaaggaaccacaggtctcaggcacacaactccaagcagttttcttctttcaaccaatattagtattttcataaacatattacaaataatacatttcagtaactcagcctccatccccaaattgtgggaattacagcttttacatgacttttgaattttattttctgtgagtgttaaactgttcccttgtttaatttattgtaattttttttttttttttaagatggagtctcgctgtgtcacccaggcaggctggagtgcagtggcgcaatctcagctcactgcaacctccacctccaaggtttgagtgattctcctgccgcagcctcccaagtagcagggattacagacaccaccatgcctagctaatttttgtatttttagtagagatagggtttcactacattgatcagcctggtctcaaattcctgacctcaggtgatccacctgcctcggcctcccaaagtgtggggattacagctgtgagccacggcgcccagcctatagtaagtgttttatgaacatgttttctctgggagaggatattttttctactataagtaatctttaaaacagttgaatttttttcatagccttgtacactactattgcaagatcattttgatttaaaacatatttttctaggaacatcagtgctttcattgcacaaaacgttttattttggcacaacagcctttttaaataaaatactttatgtgcattcaaatatttgaaaatgtttgcctctcattagatatatctctaccacaggaaaatctgaagtttagtgatgcaggtcagagcttacttaatagtcttctgggccgttaccttataatctataataaaaaataacacatacatgcatttgttcagtctcctataggccataaattacttccataaatatttctttgaaatttactttaaaataaataaataaatgaaacaacattaaaaccagaaaatgttaagatattgattgattctcccttccttaccattcccccaactttactttttggggatgaaggaaagtaacaaccttggtgtttgtttaaactaaataccaaatggtctttagataaatggcttagcagtgaaaaatatgttatttatcaactgtcaggggtacgtggggattccttaacgtgccagaagagggaagggaaccagcatttattgagctcctactttgcatcagtttaattcctacaaccctgcaagttagccgttatcatccctgtgttcagctttgcatcctaagcctggaaggttttagtaacttccccaaggtagcccagcttgttgaaggtacagcccagattggaagctgagagtctgtgtccacatatacttctccacttcaaagattgagcttggaaaaaataagctttttgacatggtcagtaatatacaaatatttatacatgattagtgcactcttctctaggcatatagacatactttgaaacagctgaaaactttatttagaacaatcctattaattaagcatttattgactctttccagagtagacatgactttctgttttgtcattacatttcccttagcaaaacaaacaaattcactcacaaaattgtcattttgacaatatcatttgtgttaggattcctttgtgttaggactccaatattatatgtgttagaattccaaatgttttcctcacatttgtcctattagttctagatattagtctttaatttttgttggggcagattgctcagagtccactgtgttacaagtatcagatagtgccaggattctaaattttaaaatgttaactccatgaaaatattttgcttaagccatcttcttttcctcagcttcctctatacctcctataatattcttttatccttcctcttgaattttaaactcaaattttgagtttggcacactctttgaattttaaactcaaagtgagtcaggtgatgacggagcattccctaagcatttgctttaatgatattgttgttattattattattattttgagacaggatttctctgtgtcacccaggctggagtgcagtggcatgatcacgggtcattgcagccttgacttcctgggttccagcaatcctcccaccttggcctcccgagtagctgggaccacaggtgtgtgccaccacacctggctaatttttgtatgtttttgtacagatggggttttgccctgttgcccaggttgatctcaaactcctgagctcaagtagtccacccaccttggcttcccaaagtgctgggattacaggcgtgagccactgtgtctggccctctaatgatattaaaataggtgttaacttttagatatttttgttttcttaggcatgttcttttaaaagaaacttccatgttatctagtagaaatagtgaatcaggctcctttttagccgcaaaattggtatctaagactttaccattagtggggtattacagccatttagcacacttttttttcttcaatatatttttgttgtaaattctcaagttataatgttataagaaaagagcagctaaaataatgggggagtagatgcagtatcattgaaaaacaaactaaaaatataaatgctatagtctaaaaattaaaagcctaaaagggactgaaaatgcaatatctgaaattattaatcactttgacaggtttgtgatcttcacttaaatctggggttctaagaatatgctattgctttgaattgtgggagaagtaaattaactacaaataaacttcagtaaagagatgtttttgttagaaatagacttggctgtcaggcatggtggctcgtacttgtaatcccagcacttttgggaggttgaggtgggaagattgcttgagtgcaggagttcaagaccaggctgggcaacataatgagactccatctctacaaaaaataaaacattcactggcacggtggtatgcacttatagtcccagatactgaggaggctgaggtgggaggatcactggagcccaggaggtcaagactgccttaagccatgatcacgctgctgcactccagcctgggcaacagagtgagaccctgtctcaaaataacaacaacattaaaaaagaagtagatttggctgtgagtaacaaagaactgaaaataacagcagtttaaacaagtttagagtcgagtgtattttatgtttaggaaaagagactagaggtagccagctcaagagtagtttggtggttccgcaattattaaggccccgaatctctcttgtttgcatttctgtcatccttagtatgggaccctatggcccaagataacttattaggctccagccatccttgcagtcaggagaaggaagatacttcctacaagtaatacatggtacttccacctaaatatcactggtcagaacttatggcagggtgcggtggttcacacctggaatcccagcacttttggaggctgaagcaggaagattgcttgaggccaggatttcaagaccagcctgggtaacatactgaaaccccaccacttcaaaataaaaaataaaaagaaaattagccaggtgtggtggcatatacctgtattcctagcaactcaaaagtctgtggtgagaggattgctcaagcctaggagttaaaggttgcagtaagctatggtcatgccacaccactccagcctgggtgacagagtgagactatgactcaaacataacaaaaagaaaaacaaaacttaggcgtctaaaataggagcacaattttatttggggatgatgaaaaagttctggagatggatggtagtgatattgtacaataatgtgaaggtgcttaatgcactataaaccaaaaatgttttaaatggtaaactttatgttatgtttattttaccacaaacaaacaaacttagtcatcaagaaggaggggaggccaaaatgtgattttaattttggatagccattgtcctcctaaaaatctgaagttccattactaatgaagaaaaggaggttaaatattgggcagtacctaactttgaaacatgggtaatggctgaaaatataaaggacaacaaacaaatatacaaaaaagaaatacagaaagtcatgcatgacctgtgaagtgaattaataagtggggattaataataatgcttttactagggacaaaaaaaaaataaaagaccaatctttggtatctaatccagaatccttacattcttttatttgttcagtggcattgccaaagcatggcatcaggcatattttggggaagggtctggcccagttatgttggatgaagtacgctgcactgggaatgagctttcaattgagcagtgtccaaagagctcctggggagagcataactgtggccataaagaagatgctggagtgtcctgtacccctctaacaggtaaggatttcactccattagtgtaccagttcttgcccccagtaccatgtcggcctgccacagcttcccttctccttaatttcaacattaccaaatgagcatacaaataaatacaccaaataaaacaaacaaaaagaatgcaaaccgtatattaaagtaccatctttttattcatagttattcctgaatttttcaatttaaggctatatagtcttgtaaagctagatcagaaaataggactttgttgcagtatatagtacccaatagtcaaaatcagtgtgcagtgatacattccagatattaggtgtaataattccatctttagtccattcatctattaacgtttcttgactcagaatgtgtttagagctggtattgatgcaattgttgattaaagcacactgtgaaagaaaccaagttaactttgctatgcacaattttcagactattccaaatgacagcatgcctgtcaaaatgtgtcatgtgttgtaagaagggcatatgtgagtacaaactggtgtgcgtgtatgtacttacatgtttagggagaagaagaaggaaatggaaaaggcaagagaaactgactcatcagaaaccatttagtaaaaagaacttgaagaaaaaaatgttttgtttacatatttctttagtgaaaatcaataacttgttagaatctatgaaataccagatttatatcattctcttcacatacttctatacatgcagttgtttttattagcagattaacacattaatacaccatagaaatgtatttacgccagatttttagccagagcacttcattttcttgaactgccattttcccctccttcaaatgaggatagtcttgtaacattgctgtgatgctcagatgagataatgcatgtcataatgctttgcagacagtaaaatattatattaataaaaggtttgttgctcagagacctttactttaaaagatccctgagatttatgaaaagtatgacccttacccaagattatttatatgtttcattgagagtttttggattattttggttggaaatggcttttaaatctactttttttggaattaaatttattatactgtttatctgcttagaagctctttatagaattataggcaaattaattattatttgagttaataagattcaaattcagatctgtattatcaataaaagaacaaaggcgagacatatcttccagtttttataattcatgaatgcctaacaaataatatatgcattgacatgacagactgtcttttatccagaatagtttttttctgtcatcctatttcagtatttttttcatttgcagttaaaattctgagctatttccaagttactgtattttctttttaaatttaaatgacatgtattgctctgacttgagactaaagttatatgaaatttcccaaatgttgtttaatctagagaagtctaaatagatactttggaattatatcaggatatatttttctacatagagaataggggtaccaataaaaaggaaagatatatatatatatatatatttttttttttttccgtgagacggagtctcgctttgttgcccagactggagggcagtggtgcgatttcagctcactgtaacctctgcctcctgggctgaagcgattttcccgcctcagcctcccaagtagctgggattacaggcatgcgccaccatgctcagctaatttttgtatttttagtagagacagggtttcaccatgttggccaggctgatctcgaactcctgacctcaggtgatccacctgcctcagcctcccgaaatgctgggattacaggagtgagccaccacacccagctggaaagaatattttattaggacagaaatgtgttacgtcaaacttcagaaacaacatgataacctcagagggtcatttagcacagatgtaatgtaagtttagcaaaaggcctagagtgaggcctgaatatggtgatatttcttgtgaaatacaaatgttgttttgcctttttttgaaagttgatttgcttagtctctgtgtctcctctttatcacagatggggtcatcagacttgcaggtgggaaaggcagccatgagggtcgcttggaggtatattacagaggccagtggggaactgtctgtgatgatggctggactgagctgaatacatacgtggtttgtcgacaattgggatttaagtaaggttcattaattataaaggcagttaaatgccagattatattgttaaaagtcttattatgttaatccctacttgtaatttttataataataaaaatacctgttctctcctacctgtgtatggaagtacaacaatgaaaaataatgacattttctaagatgatgaataaccacctcttgctgtttatttcatttacctttcctgccatgacccctcttcttgaataattagttgaagccaggggtgacctctaagtccccttgtgtctattcaagtaagactttgaatgctcatttttattctgacacgtcattactattggatgtttttagttttgacatcattgtctaaaattgcagagaagtctagtgtcaaatgctttggtattacattattccctttctcagaatgtgatgataattatcacttttatttgagaaaaacagccctcttgttaggagatgacctttagaacttgcttttgacctcactctcttaaaagctgagtatcacactttgggacatgtattttatgtcacacacataatgcattccagagtaaagacttaagttggtcgaagtaactgcaaatgatgcttttgagttaaatatttgaatgaaagctatgaatgcctattctttcttgttttccatatttctctgtcatgcttgaagtaattgtcttatgcttaaaaaaactggcaaaattgtttcattttagcttgattagagctgactgaagatattcactacactttaaaaacatagcttcattcaagctaggcaaagccatgttaaacatatattttaaaatttataaaagtaatgtaaaaccattggaaaatgatgaaaataaaaaactccataattttttatccttatgctatcattataatttgggtagataacttcatatcagctctagtaatggacatgtaatttttatccacatttttaaccttatattgctacatactcacaatttttaatgaaaacaatatccacagaattttcatactgtaatttacttaatattaggtcagcttaatttttcctgtgataagtaatgctatcatgaaaacacaatattcatataatttcccccattttgtcttttcttgggcagagaagttactgtaatttttgtgtaaaagggtatgatatgacagccaaataaatacaatatgctgacaattgataagaattagttaataaatatcactttatatttaagtgaatctcagactgccaactatactctgttttcacagatttagagagattcataaaatcatgtcatttctatttattttcacatttagagagattcataaatcctgttatttctatttttcatatttttttattaatgaaaacaacactgatttttttcttcatattttattttgtttcacaaatctatgcacagagtattcacatttattttaaaaatgttctcaataatgtgtgtaaaaagctctaaatgattgtgttagaaggtagtcaaagcatgtgttacatttgcttctagtttacaaaggaatttttgaaaaagaatattcttttgtaatgagaaaaagtaaactttgggtttttttgtacaaatgcaattccaaagtaaaatgacttcctgttatctgttgtgtagttgctatggacagatgataatctaatgtatttcgtgaaaaaatggtctataagttaaaagtgagcaatatacgatttaggcttattacttttctagccaagggttgattagtcagcaaaatagaaggaagagaagccatagaatgattaaaattttcattgttttaatttattaaaatattcattttgtcaaataaatttaataaatacttgcataaaaaaagaagaaaattcatgtcagatagaaagatctcttcatattcttagtacagaaataataaaaacatcaagtaagggaattattatatgagtaagagttgaatcttgtaggctgttagaactgaaaggtgtcttaaagatttttaagctccgtgatttctggaggtttggattttatggaacaaaaggaaataaaattgggaggatgaaagaaggtgcagattgacttaatttctaatttaaaaaatttttcagatctctcctatttctgcagcatatatatttattatacgtttaggttttgtttctgtagtgcagtgttacaaatacactcaattggaacacaaatataattgataaacattttaaagttgaatttgtataccttatgaaaagctaagaatattataattctgattttgatgggctgaaatctaaatttaatcatggattaggtatagtgcttgagcaatcactgaactaatccacactttttattttgaaagaagaccaaagagaagctgctgaaatcaaatgagttcagagggagcatcagaagcaaaatgagaaaagtgttctcactttctggtcacaatttctatggtcaggaatttgagattgatctctttgcattctctctgattggttttgtagacaaaacacaagaatgaatggggaaaaagtattaatttttcatttgttattcgttgaaataatcgaacatttttaaggtgattaaaacatgtgatgggctgggcgaacatagctctaaactgcgtccccaaggtaggagaaagaacagatacttatcctctgaagtcatgtcactgaactaagttgcttgtgttaaatgttttgtggttccctgaaccaagagacagaagttctatacacagtgtttattcaattgtcacagatatggtaaacaagcatctgccaaccattttgaagaaagcacagggcccatatggttggatgacgtcagctgctcaggaaaggaaaccagatttcttcagtgttccaggcgacagtggggaaggcatgactgcagccaccgcgaagatgttagcattgcctgctaccctggcggcgagggacacaggctctctctgggtgaggactggctgcagctctcaagtttccatcattcagtagccattgcacctctaaccactggccttgaatatgaagtgtttctcatctttggctttttttggggtctatttcccataactgtctaattttcagtaatttttatgcagagaaaaataatcttttgagtctgtgcgccaacattatgaaatttctacccctaaattgtttttctttacttagaaaattaagttcctcactaacaatgtttacaatcatctgtatctgaaaaatggaataaagaagctgcagtatctattccccttactcctcggtcacttattctgattttcatttaccttgaattctagtgagctatttgggataggatttaaaataagaatattctcctctccctgtctcatggttcatttcttctctagtcctgaagccttgtcgttcgttggtcaccaaccatccattgctcttttaagtgtctcagtggtcttctaagtggattaattaaagttaatagctcacccatctttctagtgtaacttgttattttagaaacccatcagggacctctgttactcttcatttacatttttttagactttttggataaaaggtaactagctcctctaactgtattgaaataattatagataaagatcctcttgagagtagatagcagttaaacattcttgataaatttcttaatgtctgatgaggagggcagaatatatatgaatgaaaaatacagagggaaatattcaaaatactttgttgtatgctatcacagctttattatatatctatctgtgtgtatgtgtatgtgtgtgcgtgtgtgtgtgtgtgtatgtgtatgaatagatgttaaaatagccttaggtggtctttacttttaaccttggattgaatcaactcctttgtattctcctgtttggagactgtgaagctgaaatcttcatgttataaagtaacaactttttgaacctcagagtattaaccatattacatactttaaatttgtcagagtctgtggctgattcctcattgtactgtacactgtgagagcttggtgacactgcattaatctagcattataccaagttgaaatacatgtttttattccatctcttgcaggccatatttccatttttctttcttttcattttgttctccttttcccttgccccttcttttgaaagatttgtgatcctcccaggattatgtggtggatgtggttgagggagatagaatttgtttgctggagatggattctctcagccccagatagcaggtgttggaatcatgggatgatctacgcagatatgctctgtgagctcccagtgatgaaatactatgtgacctgagttctctgtaggcctgtgttgttaaacacatcatatggttggaataactaatcttttctgttcccttgaaaatctttttaattctaggactctagatgtatttttaaaaaatttaaaaacctgagggtgataattattaataaaatatatgatcactattatgaatctctttggttctaatctcagtaatgtgtctattaactaaagtcatttgtctgaagaacattatatctgagccaaatatccttttgggatagaatcatattactatttgttcattcatagatcattacttccacctattaaaaactactatatatttaaaagggaagcttagaggaggagataacaggataacaatataaataacagcatttaggaaacaatggagattttttacttctttggcactgcaatgatgagctcttggactactgctgttttcagctatttgaaggctaatttctggaccttaactttatatgtcaagggaaacttctcaaaattagttatagccctgtagacactcttttgggtctgtggtaggtgaaatgctcaaaagcagtattctagattagtaaaagtaattctagtaagaatacagttatgtgagttggcagaaatttctgggatggtaaaaatatggatttctcgttttaatattacattaattctaaagttcagagtattaagtcctggcaaagatttctttcccagtgaggttgttgcctcttactcaattttacagtataaaattaggcttaatttaattaattaattaattaattaattgagacagagtctcactctgtcacccaggctggagtgcagtggcgcaatctcggctcactgcaacctccacctcccggattcaagcaattctcctgcctcagcctcccaagtatctgggattacaggtgcctgccaccacacccagctaatatttgtatttttagtacagatggagttttgccatgttggccaggctggccccaaactcctgacctcaggtgatctgcctgccttggcctcccaaagtgctgggattacaggtgtgagccactgagcctggcctaaaattaggcttttgctgtgtatgtatgcatgttagaatttatcttttttctaaaagacagtagtattttataaaaataatgtattatgttacaggaaaaatcaaagaaaactactgaaagcttgagatatatattaaagataactgtataccaatatgattgtttagcttttccaaaaactttatatatttaagattttggaaataaaacatgctatgtattattatttctgtaacaacacaaacttaatagtgacaacgtatggatggcatgacttttgtcatccagtttcccttcaagaattaggaatttaatgattttgtagaatgaatggctaaaattaggttcagaaatattgtatgcattatttttacaaagccatgcaagttatactttaaaaacactttatcatttttattttcagagtatatgaaaatgtgcctgtaaaactaccagaatggaacatgtagatctaatttcatgtgcaaatgttttcttaattttgaaccaaatatccaaaaatataaaaagtgaaaactttaataaaagaatttcatttgtttgattttggtatctgaggatcactttttcactttctgttcttgcaaagaactcccaaatttcagatgtattaatgagaaatatgaagtttcaatattgtgttttatgacacagctaaaactccaagtttttatccagctgatagtaagcagtgcatacatagagttggcacgccataaacatttgttgagtttgattttgctctgtgattccgctatactgccttgtcccatgaagtgaacatgattagggatagagactggggagccaacaactcttggggcaacacagaaggatggagaagtaaaaaatgggtcagaagaataaaaatagagtgtgtccatcttgctaacaatattttcttttagttaaccaatgttgatttagtaacttcacatattggtttaaacatatattaaataatatattgtccattacctgcagacttctacctccctagttctgctaataagtttaccatgctttattgtattccctaaatccttaacagcaaatcttggccctgaagctggagacccttctagtaactaggtaatcagatgtgtgagtgttagcttgcttgggttgctataacaaagttccacagaggtgacttaaacacagatgtttattgtttcacagttttgggggttggagtccacaatcaaatgtcagtagggttggttccttcagaaagaactgtgagggaagggctgtgtgagagagagagatgctccaggcctctctccttagcttgtatatggcagtcctctccctgtgtctcttcacatcatcctcttcatgtctaaatttctcaattttatgggaataccaacgtatttgattagggctcaccctaatgacctcacaattcaacccatgcaagtcacagtgaggagtttcgattcaaaatcataattattggtgtggtgatatgtgacactttacaaatcccttcatttgtattaacttagataaatcttaatttgctagagttcagtttctcaacttttaactcagtaatttttgtgacttaattctttcccttaaaatcaatagaaagccttagatggtaactgtccctatttactgcttttttttttctttttcttttcttttttttgcctcctccagcattagacttgaatcaagttacccaactatgaatgccaagattgtgtctatttatatcgttctaaaaatcttgtctttggtgtataaacttctagctctctgttcatggataaatgaacagacatgaagcagaaacaacctcaagttaatgttcttttactatttagaagtaaggtgtaataaaataattcacagttttataatgctgttcattcattcaacaaacagcaattgcatatcctctgtatgccaggcactgttccacagtctggggatacaaggttgagcaaggtgagcactttgaattcaaggctgcaagagacatacaaaagtggataaaatttttattgatatatctcctctctctcaaaaaagtatttcccatctgattttatagctgattaaaaagaacaattgtgttttgtagagtcgctcatgctttagaatcagtttgcatgtttgggctgttctaatacttttgaatcatgacttaggttttcctgtcagactgatggatggagaaaataagaaagaaggacgagtggaggtttttatcaatggccagtggggaacaatctgtgatgatggatggactgataaggatgcagctgtgatctgtcgtcagcttggctacaagtaaggaaaacctaattatttgggatggttactgatgagcatatctgaatttttaaatgcttaatctaatgagttactttttacttaaaatgagcttctgtcattcatttgaaaatactggcagcatattgatttgatccagaattataaagaagtaataagtagagcctattcacatttttctactcacagaaaatattatgtcacacaagaaatgtagctttttatctaataacaaaatagtctaataactctgactagtcataatacagcttgtatcagcttctgtcagttaaccttttctctgtgattgatgtttcaacactgtagccttttaagggactctagagttattgaaattactgttggttctcatttttcttgatagttataaagtcactgtggacactgaattagcaaatgctgagccattgctcctagagctgaggtcactgctctcccttcttgtttcagctttcatacttgttaacagttgtcctcttttacagtctgtgtggtgccaatttttttttttttgcatttctgtgcttgctttgctgatgacttcactgtttaaaatggcccccatttatagtaccgaagtgctgtgtagtgttcctaagtgcagaaaggttgtggtgtgacttagagagaaaatgcatgcattagataagcttccctcaggcgtgagttacaataagaacatggcactaaatagaatgtgaaaaggacacttgtttacagtgtgagaggagcaaaaaagaaggcagatcatctcctgttggttagacctcagctgggtaatttaaaattttactggctctgcatatgtcatgaatgactgtgaaagcaccctaagtaatgattttgaagtaacaaaaatatggaaaatgttacaattcagagggttataaatttaagataatatgtatataaattgcctagctcagagtagattactaatagtaatttggatttaaaaatatatccttaattatatatctgtgttcattttaaatattgaacacttcatatggttattttctataaagaatacatgtttattttaaaaagcatttctgttttaataaaagttcacatgttgggggtaaacttcaaaatcaaagttgtttctggttactcgatactacttcaatttatggctcagttttggacccagttgcaattccagttgtcctacagccaattaatccttcatttgtgatataaattttcaattttcaaaatatggggcagtaaagtagggagagtctacattagatgtgaaagtgaatttggtcagtggttaattttaaacttcttttgctcactgtgtttctatcactcctttttccatttgaaaaaaaaattattcttgttcttgcattacattcccagtacatttcctcacccaaaatcagccattaaaagatattgctctttgagactggtttcttggccatattttaattttattgtcttggtggaagtgatccaggaaacctagtattacctttggaaatacaaaggggaagattggcaccaaagttgaccttcaaattgtgtgtctcagctaagtttaaggagagaaaaattttctaggcatattcatcaagcatcatcaacacacatgtagtcgtgtgttattacttggatttctttctaaattgttcattactttttatttatcatcattgatatagtttggatatttgtccccacccaaatctcatgttgagatgtaatccataatattggaggtgggatctggtaggaggtgtttggatcatgggggcagatccctcatgaatggcttaggccatcccttgctgataaatgagctcatgccctgagttcacatgagatctggttgtttaaaagtgtgtggcaccctcccaccccgctttctgctgctactgttgctgtgtgacttgcctgttcccccttcaccttctgccatgattgaaaactccctgggcatcagcagaagccaagcagatgccagccccatgcttcctgtaaagcctgtagaactatgagccaattaaacctcttttctttatcaattacctagtcacaggtatttctttatggcaatggaagaatggcctaacacaatcatttagtccatttaacatttaactcaaaagtgaatttagcctcatgttagaatggctatggtcaaaacaacaaaggataacaagtgttggtgaggatgtggagaaactgaaacccttatgcacactgttggtgggaatgtagaatggtacagccactgtggaaagtaatatggaaacagtatggaaaacagttcctcaaaaagttaaaagtagaactaccatatgatctagatatcccatttctgggtatatggccaaaataattgaaattaggatgtcaaagaaatatctgcactcccatgttcattgcagcattatttgcaatagccaagatgtggaaacagcctaaatgaatggatgaagaaaatgtggtatgtatgtgtatatatatatacagttactgaaagacaaatactacatgattccacttatatgagatatcgaaaatagtcaaacttatggaagcagaaatagaatggtggttatcaggggttgggaggagaagaaaatgggaaattatttttcaatgggtataaagttcctgtcatgcaagatgaataagttctagagatctaccgtacaatacagtacctatagttaacaatatggtactatatacttcaaaatatgttgagggtatagatcttatttgtgttcttaccaaagccaaatgaaaacagaaacagaacataacaaaacaaacaaacaaacctcagaaaagaacacaaggaaatttttggaggtgatggatatatttagcaccttggttgtggtaatggtatcacagatacatgcatatgtccaaactgaagaagattttttatattgattatacctaattaaagctaaaaaagaagtgattttagatgagaaacacactctagattaagtgaacaaagtttgttgcagctttcaatatttctgtaatacttatcaatcaagaaaagcatcaaaagactttataattgcattttaaatagtcttacaagtaattcagtaatttaatgttactataacaaattggataacataatctgcaatttgccatcaaatagtatttaaatgagaattgtttagctatttgattaaatatacttgaatatttttataatttcccactgaagggaaattggatttcatataagaacatatatgtatattttcagtatatatatatatgtgtgtgtgtgtgtgtatatatatatatatatataaattataaacaggtatgtgactagtgccgaggatctttttttcatcatgtctattttgaatcacaaaaaatctttaataaaggacttatttgtagaaatcaatccaggaaactttgaagctgttataagatttgagcctcataaataggaatttcagagatctgtcctccagccagttctatgatgcatgaggattagtccttggaaatactgagaatcaaaatggtattagaaagccttttcataatgggaaagacagaaatgagataataaaaaaggaaatgtgaatggtaactaatacagatatgcttaaagtgaacagaaagtaaaaggcattatttattgatgcattacataatgtctgacaaagtctagcatatgagcatattgttcgtagattgttgatagagaatgtgttgagatcagttaaattcattgagatagactaagtagtcatgacggaaattccattatatttacactttatgtggatccagtagcatatgttccaatatagcattgtttttgaacatgtttgttagcgtattaatccttaaaaaaattttaaaaattgtatattctcactgctttaatagagatctaaaattaagtgtatctgatatctattttacatttaaatagctgcaaaggacttaatttctggtatatttgtatgacatttgaatataaaacagttataccactcttaattatatccagtgaaatataaatatagtaatttgattcagctatccattttaaaaaatacatgaacaaaaaatacttctttgaccagaaattttacagtttttttttctccttgaagttgtattttaaattttcttcccccacggaatctcaatgttattatgccttaaaaatatgtgtgtatatgtatatatacacacacatatatgcacacatacacacatacatatacacatgtatgcatatatacagatacacacacacacgtacatggagagagagaaattatgctaacaagtttcaggtgtctctggaatttataatttctagtatacaactgataataaacagcaaaatatttaataaaattattaaataattattaaacatagaaaataaaagtttaccaaagctctcatttcttaattagaccaatgggttgggtttgtgttgcttggattaaggaagcttcattgctatcatatattttgaatttttcttttgtcccctttagaggctttcaaactttggaggaatgcactgcggtaggatttggagtgagtgcaagatatgctttttgtgaagtgagagaagagaaattttgaaagagaagtttgatcttgatagcagcaagattatttttaagaaataatatatgtgaaatttgaggatataaaaattgattcacttacagcctgtgtatcccttggaaagttattatctaccaggagcacttgacatccagtttaaagactaattatcagaaagtgttgtgtcattgaaattttcagctatgaattactagattcagtaaaccagtgagaagcctttcccttttttctatggatggcagagtccttaattgtttaaagaaagagtagtcaaaagaaaatgtattagatttcactatatcaatgagaatttaatcatgtgctgttatttgttaaaatgttctctaatttctacttattgatatatctaaaatggtgcttttttttagtttgtgcaagttgatcagttgctaagaaatgatccttttggtttctttaagtgagttaaattttactttctgtatgtctacttctacctgccatctacttttatgttatttatcatgctttattttctgttttttgtgtaatcatctgttttttgattttcatgattaattcaattttcaattttcatcttttctcagtggtctagaaattcaacattcttattgtttttctggaagttctctttaaatttttagcaaacatactgaaacatactttcttaataatttcaaaaattattatctgtaacttccccttcctgaaaaagataaagacatttaacatattgttgtttactttctacctccacccattctcacctctgaaacttctgggaatcatctggaatttttgtttccaaattctattaattttttattgtcttcaaattatgccgatttgaatttcaaatttctttacattatacctatacattatcagcaattatttttatttttaaagaaggttaataaacaacaatctcaacaatcttatgcaattttgcctaagaaaaaggagagacaatacaagtaaacatagagaacagaaaagaaatttaagcacagatatatagaaggttaaacaaaaactctagtagattaacaatacagctgggcacggtggctcacgcctgtaatcccagcactttgggaggccgcggcgggcagatctctcgaggccaggagttcaagaccagcctggccaacatggtgaaaccccatctctactaaaaatacaaaaattagccagctgtggtggcttatgcctctaatcccagccgctcgggaggctgaggcaggagaatcgcttgaaccaagaagggagaggttgcggtaagctgagattgtgccattgcactccagcctgggcgacttttcaccagtccttaagaaacagtttctgaattacatgaattgttgcagagcaaagaaacttatggaaatctttccatttattttatgaagctaatttaatgtgatttcaagactaggtaagtaaacacacaaaaaagaaaactatacctcaatctaatgaatctacatacaaagttattttgctaacaaaatattagcaaatttaattctacaatgtattaaaagagcaatataccaccagtaagtggagtctgttgtaggaatgtaagagtgattcaaactgagacattcaattaatgtaattcagtgtgtcacccataaatatacaataattttaataaatgattaaacaaatatcttaataatgttgaaaagttatatgataaaatcaacattccttcttaggaagctgagaacaaaattaaactgctttaattttatatcacaaataagcatcaaataggaacaaaagagtgcctgccattactgcaatgatagcattgtctggaggttgcactaaagccttaagaattgaggtatcagtattgaaaaggaagggtcagaatatttatatgaataatatgattgttcacctagaaaacccaagagaatcaactggaaagagactagaactagtgtttattaatgtaacaagataaaacataaatacttaaaaggcaatcgtctgcctgtgggataagtagaaaataaaaagaaaaacagatctgtagaagttacaaaaactaacaacaaaacaaaaactaggaatacactttgtaagaattgagacctatgtgaaaaacctaagtctttactaaagctagaagaccttatcaatgaagagatgtaccgcaatcctgaatgtgaagacaaaatagaaataaatttatacattaaatactatgctagtaaaaatctttcatttttcttggtgtgcatatggggtggggagggggatttgacttccaaattcatctgaaatccagtccatgtggtactggcacaggaatagtcaaagaggtcagtgacactgcagcagtggctttcaaccttggttttagattgaaatcattttggaacttgaaaaaacactacccattctactttaattcatgtgagatgaggttcaggttgtgctatactttaagtgttttcaaaggcaattctgatgggtagccaaggttgtgaattactgaactataaagaccaagaaatggcttgtgcacatatagcatgataaataagaaagactttcaaatcagcaggttattgggacaactactttaaggacaaaaataaagctagatttcttactaacactaatagtaagacagaaataaatttcagacagacaagaaccgtgatatacaataaatacataaaatttaaaaaatgcaataaataatataattaattaattgattaaaaaatagaaaaaagtagaataaaacttctaggaagaaatctaagctgcccacaaagatttatgtataaggatatatatataattgtaagaagtctaataattttaaaacacatgcgcaacaatgaagaaataacttagttttctttgccaaagtttgatggagaactatccgcagaagaatcacctacagttttgttaaaaacagattacttattttttaaatgatttctttgtctattgtatgccattattctctactagaaagtatattcaccaacaaatatatttctagaaatatcaacttttaaatttatctttccactttccttggagtagtttttaggaaagctacattcttaatttttaagtttatcaattttaaaatttatagtttataccctctatgtccactttattaagtttttccctaacttgagatttcaaggatagttttccaataattcatctggaaagcttttgcttctgataactatttcattaatttgcttgaaagcttttgcctttgataactatttcattaatttatcagaaattgagttctaaatatggcgttagtttgaaatatttatttcatttaaatatttttgtatttgcatactttaaaatgtgttattaaacaaaaaattaataaactaaaagtaaatctgccatttagtcatgattcctatttttctctgtctccgttaaaaattgtacttttaggccaggtgtggtaactcactcctgtaatcctagcactttgagaggctaaggtgggtggatcgcttgaggtcaggagttggagattagcctaggcaacatggtgaaaccccgtttctactacaaatacaaacaaattagccaggcatggtggcatgcgcctgtagtcccagctacttggggggatgaggtgagagggtctcccgagcccaagagttcaaggctgcagtgagccgagatcacgccatggcactccagcctgggtgacaaagtgagactgtgtcttaaaaaaaaaaagtaaataaatataaaaaattgtacttcttttttttttgagatggagtctcgccttgtcacccaggctggagcgcaacggcgtgatctcagctcactgcaatctctgcctcctgggttcaagccattctcctgcctcagcctccagagtagctgggactacatgcccagctaatttattttattttattttattttattttattttatttattttattttatttattttattttattttattttattttatttaattttatttattttatttattttattttattttattttattttattttatttattttatttattttatttattttattatttttgagacagagttttgctcttgttgcccaagctggagtgcaatggcacgatctcggctcactgcagcttccgcctcttcggttcaagtgattctcctgcctcagcctcccaagtagctgggattacaagcacgtgccaccatgcccagctaaatttttgtatttttagtagaaacggtttcaccatgttagctaggctggtcttgaactcctgacctcaggtgatccgcccgccttggcctcccaaagtgttgggattctaggcatgagccaacgtgcccggcctaaaaaaattgtacatttttcttctaaaggaggcaaaaaaattagttcttacctctgtaggttattatttaatctcattgttttctttgcaatattataccaatattaagagagtattgtactctttaagagggtaaaaaatttagaggtgattttttcctgcttaaacgagagttaaagactatcatgattttttgatgtgccattaaatgtaagtttcttagaaaaagctaaattagaggcaagtgatgtaataaagtagctgtggagtatgggaaagtatagttaataccttttttatttaattttttttgacagtcatgaaacaaatggtttttagcacatgcagatgctaattttaatatgtaaaaattaaggaataaaattgaatacatgttgtgatttattcagatatatgactgactgattcttcacatgattaagaatgttctgtcttcaggggtcctgccagagcaagaaccatggcttactttggagaaggaaaaggacccatccatgtggataatgtgaagtgcacaggaaatgagaggtccttggctgactgtatcaagcaagatattggaagacacaactgccgccacagtgaagatgcaggagttatttgtgattattttggcaagaaggcctcaggtaacagtaataaaggtaagtcaccttctggagccctaaacaagtcaaggaatactaattcccattccattactataagcagtactttgataacagaaatctagtacaacaagaacgtatacagatccatgtcttgtgctattacttagatccggtagttcttggcaaacttgcctaggtggggctgacaggcagaacaaggttcaggggtaggaatgaatttacggggccttgtaatctctgggatcatcctcttttcactttcttagccatttctctgtttccttttttagatgtaataaagctctcatgcttgttgctatctttgaagattcagaattgataatgacttcataaaaaggaaagaaatgaaaatatagaaatgaattaaaggcatttctaaagtcttactaatattttaaacaaggatatttaaaaatgaatttcaaaaagaaaatgatgttttgtagattttattctctgaaatttaaaaatttaaggaaaatgataagtaatcctttcgtatgatacagtaatgtttcatactttaaatgaatagagttcttgaaagctctgcatacatttaattttttttttttttttttttgttgagacggagtcttgctctgtcacccaggctagagtgcagtggcacgatcttgactcactgcaacctccacctcctgggttcaagtgattctcctgcctcagcctcccgagtagctgggattacaggcgcctgccaccacgcccagctaatttttgtatttttagtagagacgggggtttcacgtgttgtctaggctggtctagaactcctgacctcagatgatccgcccacctcaacctcctgaagtgctgggactacaggcgtgagccaccacacctggcctatttaatttttatgaaacattctttaaatgactgagagaatgagctattttggagaaatttgtggtacattttatgaaaagaacagttgcctctttatctggattgaaagtttatagttctgatacactggattttgttaaaatcaggtgcacctgtattttgaggattctctttttctaacaccttttaataactgccaaagacaatgcaataagtgaattggatgtcgttaatatgattctttgctgtctgaggggcttctgattgtgaaaagaacacttacaatccttttcactttattttctattcatatatattaaatatatatacatatttttatatatgaatgtgtgtatagatatatgtatatatgtgaatgatttggccagctctttcccctgaatactgattataacttaatttactgaattccctttaataatttaaattaccattacaaatgggatataactgattctttgaattatgtgaaattccgtaagcagttgaaaaacataaaaaacattatttatatgtttgtttttaatgccttcctagaattatagcaatattctttttgatatctttccatggttatggcaatgctaccatacttcaagtaaaaagatttcatcttagcccagctagattacagaatctggcatattaaccagttgattttatgttgatactcaggacctggtgacatctataaggtgattcaaactgaagccattggttattggtcatctgatgggtttcttttataaatgaacttcatttttcttttaaaaaattttaaataatagtgtatgactttaaatagagtttactttcttgcaggctggttctttgccccagaatgatgtaaacttaaaattttgcttgttttaaacattacatcattccttttcttggcatcatatacattgacccaacttggagcattattggaaacttatgttttttctaatatcttacaatttgcagtgtcatctagaggactcatattgtaagaaatgaaggttaaagtttgaaagcatacctctgagatcattttgcaaattaatcatcttggtacacattgttgaacgtctttctccaccaagaaataactattgctgattccctgttgggctcccttctacctggttattatgggagaccattagtgttgattaggtcttcctgtacttggcacagttcccaccctcctcctcttagatagaaaaacagtacatatctatactttatacacatatatttaaccaaagaaacaaagtacctctatataaattctcctgttttctcaaatattttaaaaattagtcatacctgttgcatttgcctttctttcatataccacctttttatatatttttaatttaattcttcttttttgtatgttcttgacagaagtctgttaccttgggaggtttgcctgtatacccttaaccatagtttaccacttcaattggcttagcaaaccctttccgtatgttgacatgctaagtaaatgtaaattcagatcagaattctagcctgggaatgtgctttgctcttctgagttacatttttttatgtgacttagaacagtcttgcatgtggaaagtaagtaatttaggccattactgcctttgcagttctcttattttgtttaatgttccatacattttgttccatacattacaccaaatagcagcagcaggagatataggtacctaccaggataaagtactggacagagtcaaaccagtcagcagcccatgaacccctcagaggtgaagaatgggaaacctcataatgtttcttgtctacttgcaaattattgtcatttagtcaaatgagaaaactatttttgttacaagaaaaattttaatttgcagagaaaagggattttgacatagaggaggaagcatcagtggagtatgtcacttatcgtcttacccctctgtcagcaatgtgatagtttaattaatgacctatttctgcttcagagtccctctcatctgtttgtggcttgagattactgcaccgtcggcagaagcggatcattggtgggaaaaattctttaaggtaaatgttcctccaaaagagattttttatattacagaattatttatatacatagagtgttacaaactggggatgttctgttatataagggacttgtactcattttattttctaaactaaattcagatttcactgataatttcactgtcctttgacctatgtttacttggtatacaccatgttcttataccagcctgatttaagagattagatgtgttgctgaaaagttatatggcagaaacaaaataatttaacaggagacctggaagtgtgtgtaactacaaagattcatctaatttagaatgtatttgtttcagacttgactcagtttaatctaagttttttgtttgtagaatttactcatggaaaactttattaaatacttcttcagactgcataggcgaggtagagtgaggagagaaattacactttaaatcatgaaatataaagaagacaacttgtttctaagagtgtcagataggtgggatctatacaaatgcctataagcaaatctttagagttgctgatgctgggcctgctcagagttgtggggtctccttctcaaagtaggaagggatgtatcctggagtcccttttgctttccttttcccccacctgcaaggcattaaagttattaaagccattgctttaaccagtgctttcctttgcttttttgccttttactgacgttgatgtgtagctcattttcttcttaggggtggttggccttggcaggtttccctccggctgaagtcatcccatggagatggcaggctcctctgcggggctacgctcctgagtagctgctgggtcctcacagcagcacactgtttcaagaggtatgtgtccaccttcccaaacaacctagtgtagcttctattcatcagttcttccaatcccctcatgctctacagcactcaaggtgtcagagccaggctatgagctttcgctgcttgtgccagcagccctgtggaatgagggagtgacaaaaggagcaaagagagcccttagaaggccacttgctaccctggtgttaaaacaaactctggatttagggagaatagaagaacaggggtttttggagaggaggcagcaatgtcagtgctccccccaagaacgtatctgaggctgaaattatatctttgtggaggtagaatagacctcggattatttagttataatgataaggactagggaatgcagttgtagtgtttttgattctttgagtcttggtgtcttgtacctttgagaaaggttgcatatgtttcattcttggtttcctatagtttagtcctgattatttcttcttgtcccaaacattttatcagtcctttctgaagtcttcccagttcagaggagaggtcatgcagagtcaccagagtcacggagctcatggtggcagatcctgcagtagaactggctctactttctcttgtttagtgcttttttgtgggccttggttaatggccctttcctcagcattaattttggtatttaaatatgtataccaatgcttgtcaaaatattgataattattaaagcaatgtgttgagtacagagtttcattgtactattttaattttgtgttttgaacattgtcacaatgaagttttaaaaaaatgtgtaccacattgttgaaacatttttgcaagcagaaatttttctgttttttcttatgtgatatcatacggtacatacctttgcctcattatgtacttacgatccatccatgcagatttgttcattcactttaactgctccatgaattttaactgctattgaaagactgaaccagtttatttattcgcctgttgctgcatagttagctgctttccattctttcattgatagaaaacaatgttgcaataaacaaccaggtacaagtctcactgggtgtgtgcacatggggacatttttctgggtcctggaatatggattcccttcaatttttcaagccttgccaatttatcctttgaagaaattgtatcagtttataacccagcaatgtgtaagttcctgtttcctcaccactccacctaaacttgatactatcaaaattttaaattttttgccaatcacaaagttttggggtttctttttaattgtatttccctgaccaatgtcttcctctttcatgaattctttgttcatatactttgcctgtttttgtattgggctatttgtctatttgtaattgattttttaaatttttggatatgttctgtgtgctaagtctttgttgttaggtgttacaagtactttttcctagtctggaccttgtccttttacttgtttatggcctttttcttacaaaactgtcttcatatatttaaaagtgtcatcattttcttaaaagttttacaaaagctttgtatttcttatttaaaaaatctttgccccatttggtgaagatattctcttatttgttttcctaaaaattacctttatagttttgcttttaatatttagaagtttaatttttccagtttatttttgtttatagtatatggtatgaagaaaggacctaatcttatacttttctttatggatagttttcgcagcatttttttattaaatattctagtctttacccactgattatgctgtcatatgccaaattctcatatatccttgttcctaggatctctgttttcttccatttttgtacttcagtaaatatttgtgcagtcatcttccacattcaaggtgctgcagataatatgtattttatttatttatttattattattattattattttttgagatggagtctcactttgttgccctagctggagtgtagtggcacgatcttggcttactgcagcctctgccctgccaggtttaaggattctcccgcgtcagcctcttgagtagctgggattacaggtgtgcgtcaccatgcctggctaatttttgtatttttaatagagacggggttttaccatgttggccaggctggtcttgtactcctgacctcaagtgatctgcccgccttgcttcccagcctgatcaaacctgtattttacataacagtggctatttggggatataattgagcttcagagtccacctgtttactagtgggtttaacacattcctgtgttacctgagtggcatgaacaataaagatcatattaattcattcacttaacaaataattattgagcccttaatgttctcaggcacctgctatgtactagagatatagtggagaacaagtcagatagaatccttgctgttacagagtttactatgtagttataggagctgagaggaaggagatgttgactttgctgatatgaccagaaaaagtttagggcaccatttttaaagtgagatatttttaccaaaatgttagattcatttagcttgttaatagtccaggttcctgagcccctgctctaaatctgctgaatctttggagatgagacccaggagttgcttaggttaagacccacttgcttagaggagacgtagttgaagaatgatgatggggaagaataagtggaattgacagatgcttatctttgtcgtgttcaacatattaattgctaaactgataaaggacactgatggtaaattgattatatttttgggtgccagaagaaggggagggacaagtaatatgttggaaggtaggatcatgatggcaaaatatctttttttttcatatatgggaagaccaatttttaaaaatttcttctaaaaaaaaaactaggatacatgtgcagaacgtgcaggtttgttacataggtatacgcgtgtcatcgtggtttgctgcacttattgactggtcctccaagttccctcccctcacctggcaaaatatcttgataggctgattctaacaagcaatatggaataaggatgaaataaaatgctgcctttagttccaggaaatttggctgaaatacagcacaagtgaaaaactcactggttttagcgtcctgcaactttaataagactcagcaatacaatatggttgcccatgaaattaattcagtcttgggtagcactgacgaatggtgtccagacaaagcagtgaagaaccttgctattctgtctttctgtgctcaagcaactgtcagggagaaaagcactgtgtccatcaaacagagaactgtgctcagttctgtgtgccacacaatgagaaaaggacatggtgctctaagaagggcaagcagaaaggaaagattgtgtgggactggattagatttgttgccttttgcttcagataccacaaatgttaaagggagataagataatttttgctttaacacaaaaaagagttttctgttgtttattttttatttctttgacacgaggacagttcaaagatggaatgggctatatgtgggaggaaaagtgagttctgttaaggagtctgtttaagcagagagagcttaggttcatgtgaaggtagaggctggtggtagataagatgtagtgtttagagtactgtggtgagaaagcaaaagctatgtttgagggatggcaattattacctagaatacaggatctgggatttgttagtgaacttagagagacgagaatggcctgggatgccagggttatggattcctctttcatttactaggtagtgggaaaccactaaagttttgagccttgaaagatgatcaaggaagagtttcaggagatgagtcatttggagatttgtggcatatatctgagggggtaaggcaaagttattaatctaggggggcgtctgtgaatgggcttgacattatattaaaaaaatctttgtatatgtttgtacttacatgcctttttctggcaaattggtctgtgttaccaaatgatttaagtaggaactggagggactgtgaggaagggacctaattttatacttttatactggagggagaccagttataagattattgtaataatagaaataggtgaaaaggaaaggagggagtgaaggtagagagactgttagaaatcagtagagcctggtacaatacaacagaaggagacttggatctggccaccaagaccaggtttacaattctagctcttccaattgttaattgtttaactttgcagaaattatttaacctcttggagtctcaggttacgtcattttacatctgtaaaatgaagataataatgttccacagtgagaaacaaatgatctgcaaagtatgtcaaagtattttataacctctaaaattcaaaacaaatattggttatttttatgttggagtttaaaggcaagaattgaagactatattagtgaaagtagggaactgaggattattttatttcacttactaatggagaagaataaggtataaaattgcaaagaacttgaagaagcctattttggggctttgaatttaagcaaaataatctgttatcttcctgttattcaagatttcttgtctttcaaatttcagccaaaagttacagtcataggagttcaaggcttaaagtattaaagtaggaagattgctcaaaagttgcacttgaggttaaacactttaacttttgggttccctggatgggctcttttttttgttgttgttatttttggatttatttgtttacatgtcattatttctcctttggcctgctctgtcttgattattgcttaaagtcagtaatcgtctcatttctcatttgtgtttatacaccaagtgtctactgtatgacttggcacatagtagatactctgaatgattgttacatgatgaaagtggtggctcagttgccagatagtgaattatttaagaatgttgggctttttagaggatgatgatattttcaaactgagatcaacagataattccttccatatgtcctttggaatttcttctcattatttgcacagtttaagataaaaatagttgattaaagagcagaggagcagattatgatatgcagcattttgatatgctttggctataatacaagattcttttaatgtgagtagggaaaaaactgctttgcaaatgtgttatatatccttctgacttggcttttacctttgccggatttcatagacttcctgtttgaagcgcctaaggaggctacagctcacatctttattgatgtaagtttattaaaaggcatacagctagttactagtgattagaacaagctccaaattttgttttcctagatttagggacttttgcttaaaacaaatcctcctttcatcatcagaaacactgaaatttgcaaaatagagactgtaatctagaagcaatgtagtagggctctgagaggttcctgtccttttagatgccaggtgaaagataccttagtttaatataaggcctataggtaggggaacgggatttcatattttgaaattagcttcccctcacccccttttgacatttccactgctttatcaactactgggcttctgtatacctaaagatttcttgttcatcagagcttccttggtacctaattcttgcagtgatgtaggccaatgttcttgaccagccatttctggacaataaggcatagatcgttattaccatttgtgttatttaattatacaggattagaactttttatgtttatttgtttgccttcatagcatagtcactcttttatataatctttgtatcagaataatctaggaatggtggcctgatgaggatgagatcaaaatgccataattccactctgccatattaatgccataatgccgctagcctcagttacactcatttcatgtggagtagtctctttaagggtgctttatgtgaaggctggcaaagttttcgtaactcaactcttattccctcatagctttcacacatttccatgccaatgtaacaagcgcacctgaagtagttggtaaatcactatttaaaggctatctcatttttcacatttttcttaatgttaatgcaatacacatggaatgcagtagcctgttggcaatttgaattggaaactttgttaaattaagttcttttgtaactggcttgtgaatcttacataatataaattgctaatttttgctttctattctagattgtaactacaagtaccatgaaattgccttgcgtgtctattgtggtgcagcaatataactgagacaaaaattcctgaatattaatttcttttaattgcttattctgataacaaacctgattttgcaggaataaatgtacctgaaacaagggctttcttatttctgtaattttactccaaagtggacttgttcaagaatataactttacctgactttatctcattgactttttgccctagaaatgcaatagtagctggaaattgttagaaatgactagatatttctaattagagagatggccacagaggtaatgggacttactttttaagaacacagtgtgtcagatgcctaatatatgtttcatcatgacatagtatatggtagagcagagctcttaggaacatagcctttggtaatacacatatcaccaatcatgctaaaactatttctgtagtacacatagtatttgtgtatgtgtaagggctaacgcaagattctactgaggtttacttctctgtaagcaattggaaccatttacataaacaacttcagtcaactactttttgagtttcatccagagaggaaaaacagattttagtagtagcagatgtgcatggcctgatgtaaaatactgttttcctgtagagacgaatccatgtagagaagaaacacaaagaatatgaccctgcaacctgaattaattctacttttaattctagtaatttgttgttgttgttgtttactttagcctcagagtctcagagaaacttggacattggattttaataaactactgtgtctcagatcctctcttgctcaaacttgtctgggaatttcatccaatttttatttgagggggagttgaaggcatttcagcaaagcaaacaactgaatgatgtgtcagccaaaacctgaaatgtttgttttagaagcatttttggataaaataaagtctatcaaaataacaaaagttcaactagaaagaccttaaaatacattgcaaaagaggattgctttatatgttgtcttgagaagcctagaaccataatagatacttctgaagtccacacacatattgagtacttcagccaaagtgttatccctaaagcatataatcatacccactaggagaggtgacactagaagacaaaaatttggttggaaaactattccaatcttgtgtcagatgctcttcaaattctaagcacaaaatatattctaagaataattggagttaaaggagtgtgagactccatgcttaggtttagctggtacatttccctaaattaggacaactttaaaagtataggtacttggccgggtgcagtacctataatctcagcacttcaggaggccaaggcaggcagatcgcttgagcccaggagtttgaggccaaccaaggcaacatagtgagaccctatctctacaaaaaataatttttgaaaattagtgagcatggtggcatgcacttgtggtcccggctgcttgagtggctaaggcaggaggatggcttgagcctaggagatcaaggctcgcagtaagccgtgatcgcaccactgcgctccagcctgggcaacagagtgaacccttgtctcaaaaaagaaaaaaaagatgtgtgtgtgtgtgtattccatatatacatatgaactaacaacttcattttgacaagaatggtactgttcgcctttttgttaggtaaatatttttattctcagtttaatataaactgctgattggtgagcatacaaattctggggtttacctgccaaaatctacttgatccaggaacacagtgtatgtatggaacatgtatgctttttgcattttggtttctattagtaatctcttaggatgcttacttcatccagtgaagttctgggcatgtacgggcaggagttatgcccacacttttgagtctttggttcagtggttcccaagtctgacggtggatctgaaccccatggattttcatggggtttttataggaaatagaaacattttttgatagttttgttataatatggtaattgataagatctctttttaatttcagtaagttagggatgagagtgtatgtatgtggacatgaatgtctttcaaaataactcattcattatacatttattaagcgctttctctgtgccaagcactttgctgggtgctaaggatacaatagtgatcatgacatggtccttgcccttgaaaagcctttaattaagtcctagaaactgttacatatgcattgagagtgttcaaaaggattggctagctttcaggagagcagaagattaggaggagcctcctaggagatctttgacttgatcaggacaaaatcaggttttgccatattaggatagaggggatgagagaaacaacattgcacatagtttggataatgacgtgggtttgtaagacaactcttcaaacggtgtaaatgacaggagcacaggggccaggctggtatcagagaggggaacaaggaccagttcttagatggatttgtgtatcatttaaggaatttgaatttcacatagattggggatcccttgaagggtactcagaaggagttatattatcaggcagaaacatcactctggcggcagcatgagggatgggttgaaaaatttaaaacttgaagcggcaagtccattcaggcgactactgcaatagtcttggcatgaaatgacacattaaggcaagattgcccagggctttaacattgatattattttaaaaataaattgcctgtgctagtaatgtcctgtttctttgcttactggttgaagactcaatttttatagataatgcggaatagatttatacagccagtttagctgcaaagattaatttagccaagcgtcacagctgtttcttacagaatggaaaatactgttgcaataagacttaaaacagagtgaaatcttgtctcaaaaaaagaaaaaaaaagataaaaacccaaacaggtcaaagtactttaaataatatatttaacatagtgtatctaaaatattatcattgcaaaatgtaactaatagaaaagttgagatatttaatattcttattatctatagggacaatattttagtttttttttcatactaagtattcaaaattctgtgtattttgtactttcagcacatctcaattcagactaaccatattccaagtgctgcagtaaccacagttagctagtggctactatatcgggcactacagctctagataatttcttaaattctattaaaaagataaatgcaacatttcagcagtactttcaaggatgtatttacaataattcttgtgggaaaagtgttaaatcatttggggttttactttaaatatgtgaatgtactgttaataaaatttaatgaatatactagcgatattactagcacacagaaagtagaagtgaaaataagtacttgattactctccatgcctattactttttagttcagtatgtgaaataatcctaaattttacttaaattttcaaggaagctataagagcatatactttaggcacaatatattaaaaagcctctgaactttaaagatatgtgatgatttaagattgagtctcaagaaatcacagattaactattaatattaaagatcaacagtaggtggctatataagccaaatcatctttattgcactgtttagtttttgagcgctgacagttaatcatatatacgagatggtcagagccctacttaaggattagaatattcaggcatctcataacctccagtaattttatagaagtgggaagttttattttaaatagacactagaaaatgccaagcttttgaataccaactcagttctaagttcacattcaagtacaggtcttgtaaacaataaaagacccaagttttggttaaaaaaaatttaaggtgaaagttgttacatgcgtgcttccccactttaacagttagatgccggcacaaaataggtagagctgatgaaaccagggctggagttttggcaggtaaaagacaagcagggtagtttttcgagtgattgttgtaatgggcagacggtagaacccaagccagataataagggaagtcataaaagactaaaatgaaaaaatagtagggccaaaggatagaagtccaatgggtttgaaggattttagagctgtaaaaacagaaggcagaaataacggtatgtgtgaaatcaagatttcagaggtgtgtggttacctggtgaatacaaggtctaggttttacattgtaagtgtgtggctgagatgaggtggagaatacactcattgcagatgagtaagtcagggaactacaaaggaaaagttattggaaattaagtcttaagaatgttataagtagtggaatgcaatgagcatggagctctagtcttctgtgaaaaagaggaagtaactaggagatgggttgtgtcatgcattctaggtcagaggttctcaactgggggcagtttgcctaacagggaacacgtgactatgtctggagacatttttggtaatcgcaactggggatggagggtttgtgtaccatgtaccagtggcgtctagtgaataggggccagggatgcttctaaacacactataatgcacaggacagccctcacaacagataattacctggtccaaaatgttaataggttctgagattgagaaaccctgctttaggtgggtttggtatcagaatcatcatactttagtatgatggctgaaaaatgggctgagaactatccatctggtaaatattgcttctattttaatggactatagaaagtatacattaataataagcattcactaacttaatcaattttttgcattcctaattaatggcacaacactattttaggtgttttagattaatcagtgaacacaacaaagatatctctgacctggaatagctttgactcaagcagggaggaggataaatgcaataaattgtaaattagatagttttgttacaaagtgatgcttaaaaacgaggaaaagtagagatgaatgatattgggagtgtttgatgatgggaggaaaaagaaagatgggttgcaattttaaatacgagggtgtcaaagtaggcttcattgaggtgacatctgaataaagatttaaaagaggggaaaggatagaaggaatatatgtttatctgaaagtatagtttgggtttgcattcactttagaggaaagggaagtagtttaagtccaccttgcaagagtgaagtcgattgtactaagtactttgagggacacaaagttagtttctgccctcacagagcttcatgacaaactaacaattcttggaaataacagggcaacaacacaggacaataattttgacctattcctgttttgatcgcttttcatttgggaaatgacagattaatgattagtctttattttccactcatcctccacatttgctccttcttggagaacagattacataatgaaatgaagatgaggttatgacaatgggtttgcagtagaggatcaggaatggtgggtcagataaatggaaagaaaggttgaatttacaaaaggggctgatgatttggaagaaaggcttgtatcttcattagtcttccttcttgacaataattttcagtatctgaagcaagtctctcattagtactctctgcctctcaggtatggcaacagcactaggagctatgctgttagggttggagattatcatactctggtaccagaggagtttgaggaagaaattggagttcaacagattgtgattcatcgggagtatcgacccgaccgcagtgattatgacatagccctggttagattacaaggaccagaagagcaatgtgccagattcagcagccatgttttgccagcctgtttaccactctggagagagaggccacagaaaacagcatccaactgttacataacaggatggggtgacacaggtaaggcataatcaaaaaaagcagggcacctttttgtgtctggtattatccatatatttgggtgtgcaatgggcaataagatcttaaatggattcagacttatttggagaaattttgcttagtgtgaaatgcatgcatgtaattgagacttatattctggaggtattgttggttctaatgagaactttagcataaactgagaactcagtttaattcagtgaagtagatatgaattgatgtgctaatgcgaaaccagcattaatgcattctatgctttttaatatacagaattcaaatacgaaagcctgcacaaatatgctttcttaggtcaccttactctacaaatccataaatgttattcattattcctcagacaattcagtactgagaaatttgtgaaggttaagattgtgtcaacattaaaaaaggcagctaacaatagtacataccagttagtcattgctcattttaaactacactaatgccacaacagggattttattttcataactattacatgctcagtaactgttaaatgttgcgatggttatctggaatgccactaatcagatgtttggtctgagtaggacgagcctattcaagaacactacaacaagcagccattcccttacttcctaaaaggttttgtgaagaacgttataagggtcggtttacagggagaatgctttgtgctggaaacctccatgaacacaaacgcgtggacagctgccagggagacagcggaggaccactcatgtgtgaacggcccggagagagctgggtggtgtatggggtgacctcctgggggtatggctgtggagtcaaggattctcctggtgtttataccaaagtctcagcctttgtaccttggataaaaagtgtcaccaaactgtaattcttcatggaaacttcaaagcagcatttaaacaaatggaaaactttgaacccccactattagcactcagcagagatgacaacaaatggcaagatctgtttttgctttgtgttgtggtaaaaaattgtgtaccccctgctgcttttgagaaatttgtgaacattttcagaggcctcagtgtagtggaagtgataatccttaaatgaacattttctaccctaatttcactggagtgacttattctaagcctcatctatcccctacctatttctcaaaatcattctatgctgattttacaaaagatcatttttacatttgaactgagaaccccttttaattgaatcagtggtgtctgaaatcatattaaatacccacatttgacataaatgcggtaccctttactacactcatgagtggcatatttatgcttaggtcttttcaaaagacttgacaagaaatcttcatattctctgtagcctttgtcaagtgaggaaatcagtggttaaagaattccactataaacttttaggcctgaataggagtagtaaagcctcaaggacatctgcctgtcacaatatattctcaaagtgatctgatatttggaaacaagtatccttgttgagtaccaagtgctacagaaaccataagataaaaatactttctacctacagcgtataaactagcaaaatttgaaaggatttctggtaactaaatgccagctggacatacaacctattttatccaacacattaacatatctactatatttgcttttaacaagcacctcatcatagtccacgttccccgaccatgatgtaagagtgccacccactgacacttccctgtaactgacttatacctgcaggttttcccaagcccaacctgatacaatccaatcttaaaatatactagtcaaaatgctttcctggcctacacattgaaaagttctaatacatacagcagttataacatatgccaggcactgcattaggcagctttgcacatcactgacaatttgcaaaaggccagtaaatcttatggtagtagcccttgttttcaaatgggggaaaacaggcttgcctcaaagtgagaccagttggtgaaactgattccaaactccagaaaaaatgctgatttttttccccatggttctcctacctaaatgattggtttccctatggctatttctccaagagttaagggatagctgcttaactatgcacctttacagaacattcttagcagtaatgctcaaatttaaaaggcacactcaagatacttccatgtcatggatccttccccaggtcccagtagtataaatatagggaagaggttagcatgaacttacaaattgttttaagtaatcctcttgaatgccagtcattaaaggactttgcccttctacatcaaattacatccttttcacaaatccccatttctgtaataactggtgcaaacctaaaggtgctttatagttttactactttgcagatttgcaatgctgcatataatgcagaagagcattaaaaacttttgtaaaaactcatgattttgataaacttttaaagtagcgtttatatgtaaatagaactacacatggcacacacacttgcacaagggcttcagaaaaacgtgcaatataggtgagaaaaatgtctattgaaactttctcacaggctgcccttataattaaactagtgttggggcaagcaacatctgtttcaagtagatcagggactagcaaacctaaaaggcagcaagcagcctgcagtttgctcaatccttaagaatacatggttcatacaacatgcttttactatgtcttaagtgtgacttttgaaagatacaagtgttctgtgcatatttgtgtaaataaatacataattttccaccttgta

SEQ ID NO: 449 - DNA, 21200 bp, Homo sapiens
  source 1..21200: mol_type = genomic DNA; note = NC_000012.12:c7670599-7649400 APOBEC1 [organism=Homo sapiens] [GeneID=339] [chromosome=12]
tatttttagtagaggtggggtttctccatgttggtcagactggtctcgaactcctgacctcaggcgatccacccgccttggcctcccaaagtgctgggattgcaggtatgagccactgcacccggccaggttaggtgtattaaatgaattttcaacttaacaatattttgcaattatgatgggattatggagacatgacttcattgtaaactgaggagcatttgtatacagatatgacaaagcttgtatccacaatacgtaaaaaactcttacaactcagtaatgagacaaagaacccaattaaaaaatggacaaggccaggtgtggtggctcacacctggtaatcccagcactttgggaggctggggcaggtggatcacctgaggtcaggagtttgagaccagcctgaccaacatgatgaaaccccatctctactaaaaatgcaaaaatcagccaggcatggtggcacacgcctgtaatcccagctactcgggagactgtgacaagagaatcacctgaacccgggaggaggaggttgcagtgagccaagatggggccattgtactccaacctgggcaacaagagcaaaattttgtctccagggtgggtgggaggtgggcgaggtagggagggaagacaaaaaatttgaacaagtttcagaaaaaagatatataaataactaataagtacatgaaaagatgttcattgcatttaattttaatgcaaattaaaatcacaatgagatactaccacacactcacaagtatgattgtaactaacagggctgacattactaagtactgatgaggttgtataacaattggggctctcttatacacctgatgaaaatgtaaactggtaacaacaatttggcattttcttcagttaaatgtagctgggtgtagtggctcacacctgtaatcccagaactttggggaggccaaggcaggaggatttctcaaacccaggagttcaagaccaacttgggcaatatagtgagaccctgtccctataaaaaataaaatcaattttttaaaaaagagttaaatgtgcatttacctatttgatccagcaatttcactcttgggtatttacccaagaggaagaaaaagagacatgtttacacaaagaattgtatacaaatgttcacagcagctttattcatgaaagcctaaaattggaaataacccaaagtacatcacatcgacagaagaatatacaaatcgtagcatacctatgcaatggaatactattcagcaatgaaaattaaccaccaatacacctaatcatgtagaccgattttacagaaaagctgaagaacagcctggccaacatggtgaaaccccgtctctactaaaaatacaaaaagttgtatagtgagaccctgtctcaaaaaaaaaaaaaggaaaagctgagcaaaagaacacacaaaagtgtgcacaatgcatgattccatttgtatgaagttctataatagtcaaaactaaactatagagacagaaagagcagtatttgcctgggactaggagtaggaggatagctgctaacacacagaattggggggtgctggccaggcatggtggctcacacctgtaatcccagcactttgggaggccaaggtgggtggatcacttgaggtcaggagttcgagaccagcctggccaacacggtgaaacctcatctctactaaaagtacaaaaattagctgggcatggtagtgcatctctgtaatcccagctacttcttgcaaggctgagacatgagaatggcttgaacccggggggctgaggctacagtgagccaaggtcaagccactgcactccagcctgggcgatagaggaagaccctgtcttaaaaaaaaacaaaaaaacaaaagaacttttggggtgatgggaattttaaatatcttgactggagtagttacataagtgtatgtatacatttttcaaaattcataaattttcaggtgcaggacagacttaaactgaatagctacatttcatccttgattatctttgacctcacttacaaataattaaccacatgatagtctgtcatatgtcatagttccaagttttcttaaacaaaacagaacatggacgaagcgctcaataggcattctagtagaaaacaaacccaagttttgcaccctcttggctgctgcatgtttacttcctgggagcatgtcctaccatatcagtttcctattgccgcttcatgaaattgccacagacttaatggtataaaacgacacacattgttttatagttctggaggtctgaagtacaaaacaggtctcactaagctgacatcaaggtgtcatcagggtagcatttcttctggaggctctgggggagaatccattccttgccttttccagcttctacaggctttcctcattccttgaatcgtggctccctttgagccagcaagcagaattctgctctcatcctcatatctccatttcgcatcctgactctgactcttctacctccctcttataaggaccctgtgattagactgtgcccacctgcataatccaggattgtcttctcatctcaagatttttaattaacgacaaagacccttttggcacttaagttcatatgtttaacagattccagggatcaggacatggatatcgttgatggctattatcttacctttttttttttttctttttttttttagacgtagtctcactctgttgcccaggctgcagtgcaatggtgagatctcggctaactgcaaacttccctcctgggttcgagcaattctcatgcctcagccttccgagaagctgggattacagtcacctgccaccacacccagctgacttttatatttttaggagactgggttttgccatgttggccagggtggtcttgaactcctgacctcaggtgatcctcccatctctgcctctcatagtgctgggattacaggcgcgagccactgcgcctggcctaacctacttttattctacaatgattctactcttacctaacttagaaaaacttggtctctgaagggcctttattgatgatgtgggatttctgccccttcttcaaaacactggtctgcccctgtcgaaacacctgctttatctcatggaggctccaggttgactttcataactaagtaaagtcttgtatgtaggattcgggtttcaggttcatggggccttgagattcaaagttcaggagttctagatttgagacactagagggagacttaggccttgaaaaagtgacctcaattctaggagtaagtgctgagactcagaggaatttttggcttgaacttgacccagggttcaggcaacagagagcaatggcatagggaagtatggcatttactttttcaagggggataaaaaagcagaagtggctgggagaggtggctcacgcctgtaatcctagcattttgggaagctgaggcgggtggatcacctgaggtcaggagtttgagaccagcctggccaacatggagaaaccctgtctctactaaaaatataaaaattagcctggtgtggtggtgggtgcctgtaatccctgctacttgggaggctgaggcaggagaatcacttgaacctgggaggcagaggttgcagtgagccgagatcgcgccattgcacttcagcctgggtgacaagagcgaaactctgtctcaaaaaaaaaaaaaaagggcagaagtggacttggccacacacttaatcttagattcaaggatgaagagagcaccaaagacctgtacacaaattagctgactcagaggccaaggtccttctcattttgtatctaatagctcccctcccctctccaacacggatgtaggacagagagcaaaatgagaggaagttggaaataggtgaataacagctgaaagccaaggccacagtgtgctcaccagataacataaaaattttcaagctatagttacagattaagtctctcttaactttatttttcctctcatctctccattaaagaatgatgcatcctaggctaggcacggtggctcatgcctgtaatcccagcactttgggaggacgaggcgggtggatcacctgaggtcaagagttcaaaaacagcctgaccaacatggtgaaaccccgtctctactaaaaatacaaaaaattagccgggcgtggtgttgggcgcctgtaatcccagctactcgggaggctgaggcaggggaatcgcttgaacctgggaggcagaggttgcagtgagccaagattgtgccattgcactccagcctgggcgacaagagcaaaactccgtctcaaagaaaaaaaaaaagaatgatgcatccttgatgcagagtaggagataatgaaaaataaataaataaaacaaaacaaaacaaaaaagaatgatggatccaccttgccttaatctttatttaaagaaagagaaagtttaccaaattcagatgtcattgaagaactttggaatttggtacccagtgatccaccctacaaaattcatgtcatttgcatcataggctttctcatcactaaagatgcaaatccccacgataatgtccctctcagtcggccccctgtttgtacagacagctcagattcccataactgcctgagatgcgggaatgagtcatcctctgcccaagcaggtggcagtgggcacacctgaagcaacaaagtccaggaacaatcagcacaacttatgactccagaggaggaagtccagagacagagcaccatgacttctgagaaaggtaaaatggatccgggggcttggcaagtattcttgaacaatgcaagaatggtgtgtgtgtgtgtgtgtgtgtgtgtgtgtgtgtgtgtgtgtgtgtgtgtgtgtcctgctgattcttgcatctgtgggtgttttcaaacttccctattattgattaatatattagtcttaaataagatggtttattattagtaaatatttacatctccaagtgactttaaccaaatcagtgtttgtttcaccatgataaaaaattaagtagccaggcgctgtggctcacacctgtaatcccagcactttgggagtccaaggagggtggatcacttgaggcccagggtttgagaccagcctggccaacatggtgaaaccctatctgtactaaaaatacaaaaattagccaggcatggtggcgcatgcctgtagtcccagctactcgggaggctgaggcaggaggatcacttgaacacaggaggcggaggttgcagtgacctgagatcacgccactgcactccagcctgggcaacagagcaagactctgtctcacaaaaataaaaaaaaagttaagtaaaagtacaactgtttaaataacagtttaaggtaacaacagacgtgatagcatgagaacaatgtgctaattgacaaatgaattgactataactaattgataaatttgtgcacagtcagtgttagaaaaatgcatgggagaggaagaacacttcaggctgaaggaagtaatttcagctgagctaggatttgagctggattctaagagaagtgtagacctaaaaaaatttttatcttattttgtttttagagactagcgggtgggttcactacttcgcccaggctggtctggaactcctgggctcaagcaattctccacccttggtctctcaaagtactaggaatacaggcatgagccaccatgcctaaccaaatttttttttttttttttttaagactcgccctgttgcctaggctggagtacagtggtgtgatcactgctcactgctgtcttgacctcctgggctcaagagatcctcccgcctcaccttcctgggtagctgggacaacaggcatgggccaccagccctgctaatttttttgtagagatgaggtcttgctttattgctcaggctggtcttgaactcctgggctcaagtgatccactagcctcggcctcccaaagtactgggattacaggtgtaagccaccatgccaggccagaagggcagactttggatcgacaaagaagaggagattccaggttgattgaatcctattgatgaacagaatttaaaagcttttatagagacttgtgtctggaatataatgaataaactggttaggctacaaaaaatttatgtaaacaatttgcagtaagaccagaaagcaaatttgaagtgttattatactatagaggacttcgaatgccaggctcaaggaatgaaagtttttctttatggtagagggaatatctttggagaatttatgaatagcacagagatatgactaaaatagtgctttagacacatttacttgacatgtgatgggttttggactggaagcaaggagaccagttagaagactattgcaatagtgtgagtgtgatggggcagaaggtaatatagatatcagtttggagttgaagtaacaatttattttctcctttatgttcttcatctgttagaattcttttttaaggtcaggtgtgatggctcacacctgtaatcccagcactttgggaggtcaaggcaggcggatcacctgaggtagggagtttgagaccagcctgaccaacatggagaaacaacgtctctattaaaaatacaaaattagctgggcacggtagcacatgcctgtaatcccgctacttgggaggccaaggcaggagaatcacttgaaccagggaggcggaggttgcagtgagccgagatcgcgccattgcactccagcctgggcaacaagagcaaaactccatctcgggaaaaaaaaaaaaattcttttttaagtggcatactgggggaaagaccaaacacattatttgattgtagtagctaataccttccctggacttttcttatgaaggtggtgtgttctatacctcaaactgtccccagtcatgtggctggtatccttgtctttgcatcccaggaataatattgatcagtgtagacacagcatatgtctcaccgtccctttctgaacttctcactgctgcttcagctctttcagagaaagtgtcttcccatcatcaaatgcctttttcctatgatgtggcctctgtttatgtaaggctccctcggagtagattactggttcaagggccccaatttgcactaagatctgagaagagctcattccaacgtgccagccacccccttcctccttcctcccaatgctcaaatcccccattcctcctttaaaagtaagagatttgttcttcaggtcacacttggaatagtgtttcctgacttcgtcctatttcctagatatctggctaatttctcattttagttcttctccccagctagaaccactctctgcaaaaaaaccatgccatgcccaagtcctttctacaactcctctaccatccagtgcaaatgcataaaaagtaacacacacaaacaggtacacacacagcctagggtaaagcatgctctgttttaaaggaagtgtcttccagagcctgtgactcttctctgttcaaaaatagcacctgcgagttaaggtttggccaggagcgtgggatgaatttcttgcctgcatctccccaaatcacccttagaggttcaggccttgtcagcgcccattttattgccaggaacatccccaagcctctgagtcctgagaggcgcaggtctctaaaattcagtactctcccttgaatcatccccatactctctaatggcttcttacacttagcatactatccagagctggtaaggccctgtggcttaccccctccattgctcatctccctccattgcaggtcttgatcactccgacccagccaagctgacttgcttgctcttccttgaacaagtcaaggtccacacttcaggtcgtttgcacctggtgttccctgtgcttggaaagctctccccttccccgacgtccacatgtcttgctctctaaatttacattcaggtctcagctttaatgtccctctttatagatgtcttctctgactgccatctctgatatggtcgatatggtgcccccaccaccttttgtctccttccagtacttttcttcttcctttttttttgagatggagtctctctcgctctgtcgcccaggctagagtgcaatggtgtgatcttggcttactgtaacctccacctcccaggttcaagtgattctcctgcctcagcctcccgaatagctgggattacaggcacgtgccaacatgcccggctaatttttgtatttttagtagagacagggttttgccatattggccaggctggtttcaaactcctgaactcaggtgatccacccgccttggcctcccaaaagtgctgggattacaggcatgatccaccgtacccggccgtctttttttaaatttttaaattttttttattttttaaagacaacgtcttgctctgtcgcccaggctggagtgcaatggcgatcatggctcactgtagcctcgaactcctgggctcaagtgatcctcccacttcagccttctgagcagtggggactactggtgcacaccaccatgcccggctaatttaaaaaaggtttggttttgttttgttttgtttttagagacggggtcttgctgtgttgcttacggtagtctcaatttcctagcctcaagcaatcctcccgcctcagcctcctgaagtgttgggattataggcatgagctatggcacccagccagggactcttttgactaagggagagatcaagataatccccactccctgaagccctgtgcattgggaatttagatgactgctcatttccacatcaattgttacttcccatctctcaattctagtgctggacctactattaggttctatacctaagagcagcaattgttgcttttttctctttccccttccaggttagcacgattcaaagggagaatctgtgtccacttgaggtcccttatgtagcaggactgccctgtaaatgtcttcaggaaccacttggctccagttggagcctggtccttttttgctggttcaataggatctttccatatgttctttacaagtatctttttacacttattactcattcagttatcttttctccttcctctcgagttgtggtttaaaatatgtataattacaattataaagagatatctatctatctatctatctatctatctatctatctatcatctgtcatcaaagatatcctggcttctctccacactaccaaatactctttcttattttttaattataatttttatttcagattcatggggtacacgtgcagatttgttacaagggtatatattgtgtgatgctgaggtttgggcttgtattgactctgctaccgagatagtgaacatagtacccaatgggaagtttttcagctctttcccctctccctccctcagtccttttggacttttccagtgtctattgttcccgtcttttttttttttttttttttgagacggagtctcgctctatcacccaggctggagtgcagtggcgcaaatttggctcactgcaagctccgcctcccgggttcacgccattctcctgctgcagcctcccgagtagctggaactataggtgcctgccaccacaccaggctaatttttttttttttttttttgtatttttagtacagacgggatttcaccatgttagccaggatggtctcgatctcctgaccttgtgatccacccgcctccgcctcccaaagtgctgggattagaggtgtgagccaccatgcctggctgttcctgtctttatgtccatgtgtacccaaggtttagctcccacttataagtgagaacatgcaatatttggttttctgtttctgtgttaatttgcttaggataatggtctccagctgcatctatgttgctgcaaaggacatgatttatgatttcattcttttgtatagctgtatagttttccatcaaataccctttttttttttttttttagatggaatctcattctgtcaccaagggtggagtgcagtggcacattcttggctcactgcaagctccgcctcccgggttcaagcgattcttgtgcctcggcctcctgagtagctgggattacaagcatgggccaccatgcctggctaattttttgtatttattagagacggggtttcaccatgttaggctggtctcgaactcctgaccctcaggtgatccacccacctaggcctcccaaagtgctgggattacaggtgtgagccactgtccctggcccaaataccctctctttctttctttctttctttctttctttctttctttccttccttccttccttccttccttccttccttccttccttcccttccttccttccttccttcctttctttttttgagacagagtcttgctctgtcacccaagctggagggcagtggcatgatctctgctcactgcaacctctgcctcccgggttcaagcaattctcctgtctcagcctccagaatagcagggattacaggtgcctgccaccacacctggctaatttttgtatttttagtagagacggggtttcaccatgttgcccaggctagtcttgaacccttgaccttgtgaaccacccgcctcagcctcccaagtgttgggattacaggcgtgagccaccgcacccggcccaaataccctttctttaaattgaaactttattttattttatttatttatttttttgagacgtagtctcgctctgtcgcccaggctggagtgcagtggcttgatctcggctcactgcaagctctgccttccaggttcacgccattctcctgcctcagcctcccgagtagctgggactacaggcgcccgccaccacgcctggccagttttttgtatttttagtagagttgggttttcaccgtgttagccaggatggtctcgatctcctgacctcatgatccgcccacctcggcctcccaaagtgctgggattacaggcatgagccgctgtgcctggccagtagttgcatttttagtttttcttttttaaaataaatttgcaaactgttttccagtatggctgtaccagtttacattcccaccagcaaagtatgacagattcagtttctctgcatccttaccagcatttggtgttttgcatgcgtgtctgtgcacgcacacctatacacacacatatagccattctgataggtgtgtaggaatatctcattgtggttttaatttgtatctccctggtgcaaattaaatggtgagttggtcacaagtactccaggttgccggtagttccttttgtgtgtgtgtgtgtgtgtgtgatttttaaatttcaaatataaacatatatatatatatatatatatatatatttttttttttttttttttttttttttttgagagggagtttcactcttgttgcccaggctggagtgcaatggcgcgatctcggctcactacaacctccacctcctgggttcaagcaattctcctgcctcagcttcctgagtagctgggattacaggcatgcgccaccacacccagctaattttgtatttttagtagagacagggtttctccatgttggtcaggctggtctcgaacacctgacctcaggtgatctgcctgcctcagcctcccaaagtgctgggattacaggcatgagccaccgcgcccggcctataaatatatttttaaattttctttttttggtggaagtgctttttttttttttcttttgacatggagttttgctctcgttgcccaggctggagtgcaacggcatgatctgggctcaccgcaacctctgcctcacagattcaagtgattcttgtgcctcggcctcccaagtagctgggattacaggcatgtgccaccacacccggctaatttttgtatttttagtagagacggggtttcgccatgttggtcaggctggtctcaaactcctgacctaaggtgatccacctgcctcagcctcccaaagtcagccaccgcgcctggcctaaattttcaatcaatatgtgccaagtgattattatttaaaaatattagcttgagaagagttctcagactcaattttattgtcatgagcctcttacagtgaggtctcacagacttcctttttccttcatgccactgactctgagaccatctggcactgtgacacctctgttgggtaatcaagccataaatcaaaatctttagtctccaattcctgtatcgcctttctcaaaacgcagcctgagtctgaaaaataatgtacctgtaaccaaggactccaacacctatttaatcatctatcaaacctgaaataaaaacccaattttggccgggcacggtggctcacgcctgtaatcccagcactttgagatgctgagaggggcagatcacatgaggccaggagtttgagaccagcctggccaagatggtgaaaccccgtctctactaaaaatacaaaagttagccgggtgtggtgacacatgcctgtaatcccagctacttgggaggctcaggcacgagaatcacttgaaccctggaggcaaagtttacagtgagccaagattgcaccactggactccagcctgggtggtggagtgaggttctgtctcaaaacaaaacaaaacaaaacaaaacaaaacaaaacagaacaaatcaatttccaggtgattctatttcggaaattggaagaaattagggacttttgatcagtccatgcatttttgtcatagacttcaattcttttccaggaaatagttttgggtattttttttgttatttatttataattttagtttaattattattatctttttttgagacagggtctgtctctcttgcccctgctggagtgcagtggcatgctcatggctcactgcagcctcaacctcctgggctcaagtgattatcccacctcagctttcctagtagctgggactacaggcatgcaccactacagctggttaaacttctgtatctttttgtagagacggaaatttccccattttacccaggctggccttgatatcttaggcttaagcgaccatcttgccttggcctcccaaagtgctgggattacaggtgtgagtcactgcctacagcctggtttgttttttaattttgttttgttgttattgattgtttttattttaaggaatttagtagctctagatgcaggcttatcttcagttttccacagcccttgctcactttcttttcatgggaatggcctgggcctaccgtagaaagcatacttcacagtatatggctagccctctatatgaaaaataaaacgtcagaaagtgtgcaatccacctctctccagccttaaaggtgcaaaaagcctcagagtcacttcaaaagtgttctgactttggagacatattccaaggactggctcaacttaggttctatgttatgcaactagacattcagctaacaatttggcagtcatggcgaggaaacatacacatgaggctcaattcaagggtagtaacttagtacgaaatgcagttggttcaaatgattctggctgggatgccaaatatgtaattgagatgtttatgttaccagtattattagttccctttttcctctgttaaatagctatttacacacacacacacacacacacacacacacacacacacgtatatacaacacactaggacaccaagtgggtatttttgcaacccaaactaaaaatccataagcatatgcatggcaaaccgaatagtagagataagaaagagaagtattcttacacaggaggctctcacctcctcaaaattcccaagttgacatttaatgtcaatgatgttcatgccattgaaataaacataaaacaggcatctttctaaccctctgaaaggctgccgtaataacagtgcttaacgtttatgaagcatctgctgcgtcaggcaccttgcaaatgttttccattcattgtgttacgtgagtcttccgacaaccttgtggaataggcaatcttagggtctacatttgacaaatggggaaactgaggtctagagaggttaggaaacttgccaaatgtgttagagcaagtaattggctaaactgggattataacccatttttctctgaccctagagccttggctcttgattgcaacactgtgttgcttctttagactagactgagattcatggaccattttaagtttgtaaccacctttgagagtctgaatggaggacgtggttttgcctggttttacttcctcctctagagtgcggggtccatattcctctgatgataagggccaggagagccatctaaacaaagtactgcttagatcactccaaagccggggccactcacactgcaccccaggaaactgaacctctgtcctttccagcccagactttcttccacggagtgacactgattagtttgtaggccaggtgaggcatgatttcataaccatggagtaatctgaccagggtcatgcaggggagcagcaggcctgcggtatataaattctcaaatacacatcttccatttatttccttatttctttctttaaaaaaaaaaaatttggcctaggcatggtgaatcatgcctgtaatcccagcactttgggaggctgaagcaggaggatctcttgagctcaggagtttgagaccaacctgggcaacacagagagaacacgcctccacaaaaaaaataacaaatgaaataaaattttaattttttaagagacagggtctcactgtatcacccaggctatgtacagtgacataatcatagctcacagtaacctggaactcctgggctctagtgatcctccctcctcagccactcaagtagccacaggtgtgtgctaacacaccctgctaattttacattttgtaggaatggggtctcactgtgttgcccaggctggtctcaaatttctggcttcaagagatccttctgccttggcatctcaaaaagctgggattataggtataagccactgcactctctctctatatatataaaatcaaagccccaccaatgccacctccttttctattttccaaactactccaccaccatggtctgcaccactccctgtgaggcccctcaaagctgtccatgcccatgtctacattaggcttctctacccatcgtgtcataacatttcctgtatttccatttctttctttctttttttttttttaaggagtcttgctctgtcactcaggctagagtgcagtggcgtgatctcggctcactgcaacctccacctcctgggttcaagcaattctcctgcctcagcctcccaagtagctgggattacaggcatgcgccaccacgcccagccaatttttttttgtatttttagtagagatgcggtttctccatgttggtcaggctagtctggaactcccgacctcagatgatctgcccgcctcagcctcccaaagtgctgggattacaggcgtgagccaccacaccgggcctatttttaatttttatttttgagacagagttttgctcttttgcccaggctggagtgcaatggtgcgatcttggctcactgcaacctcctctccccaggttcaagtgattctcctgcctcagccacccgagtagctgggattataggtgcccgcaatcacacctggctaatttttgtatttttggtagagacagggtttcaccatgttggccaggctggtctcaaactcctgacctcaggtgaaccacctgcctcggtctcccaaagtgctagaattacaggcgtgagccaccgcacccggcctctaagaggctttaagaagtgactttcccattgtgcttaatcatttttgttgaagccttaaggcagactaccttgtttgggattgggcatctgggaaaagagattttggcagagtccttaaaaatcttgcttttcttgggtacaatgagctggtccaatacaattaatccatgagagaatcttcaaattccattttctgagatgatttggaggtttggaataatagagcactttttcttagcaactcatttgatatttgagtgttgtttgacataatcatatcttggtcaacaggtccttcaaccggtgaccccactctgaggtaagaataacactatcacagtgcccatttaatttgatcaagaatcaatgggtatttaagagctgtgcatggtggcacatgcgcctataatcccagctactcaggaggctgaggcaggagtaggaggatcgcttgagcccaggaggtcaaggctgcagtgagctatgattgcaccactgcactgcagccggggtaacagactgagaccctgtctcaaaaaaaaaaaaaaaaaggaactgtggatatagctttctttattgttccttttctcttttgccattttccattctttctttcatttttgccttttccagtttcattttctatggttattgttttttatatctttgctcttatgtcttttgatctctttaaataaatgattttctagcttgcttatctgttattgtcttacaatttctcttctttttttaaatcgcatgcttttatagccattagtgaaatacctgggaaactcatttgtcactttaacttcatcttcgttttataatgtctgcccatttttcagacataggacagggaagtcatgttaaggaatatattatctcttgataggtggaaggattgatctatgtagtaaatgaatgtgatactttagggatgagtgggaactattaggatgtaataagcttgtgacttaaccatattgcaaagaagagtctgcagttcaattctgagtttcccttgagttacagctttcagacatagagagtgttaaatctaaagacaccactgagagcaagtagaatttctttcttataggagttagtatatagaatcctaatgtggaagaatcttgaggctaaattgctcttttgtctgttcttgacaatacaatcttgttggcaatttgaggcgtcaacacttgagaaaatctggttagagtccattgaggaatagaaaagataaggattggaacatagcacctctaggtgtaaaatagaaaagttagaatatagctaggcatggtggggcacacctgtggtctcagctactcaggaggctgaggcaggagagtagcttgagtccaggaaggggagatcaggctggccagcttagagagaccatgtcttaaaaaaaaaaaaaaaaaaaaagggttagaatataatgaaggaaaatttaaaagagaaacaaagacacgcttacacctgaattcaagactaaaacataatggtattagagagtggtcaccaaataatgtgactgggggaagaaacctgtgcactatgtttgtgagaaaaaaaaatctgataattcaaacagacctcttcagataactttgagacatatactagaaaaagaagtttcctgagatgttatgtctcagatcagcctgatagaagaggggagcagaggctgggcgtggtggctcacgcctgtaatcccagcactttgggaggctgaggtgggcgaatcacaaggtcaggagtttgagaccagcctggccaacatggtgaaaccccgtctctactaaaaatacaaaaaaattagctggacatggtggcgggagcctgtaatcccagctacttgggaagttgaggcagaaaaatcgcttgaacctgggaggtggaggttgtggtgagctgagattgcaccactgcactccagtctgggcaacagtgtgagactccatcttaaaaaaataaaataaaataaaataaaataaaaaaagaagaggggagcaggaaaagatttctaagatctctctaaatgtggcatgacagtgtgggctgctttttgtatttcaggagaagaatcgaaccctgggagtttgacgtcttctatgaccccagagaacttcgtaaagaggcctgtctgctctacgaaatcaagtggggcatgagccggaagatctggcgaagctcaggcaaaaacaccaccaatcacgtggaagttaattttataaaaaaatttacgtcagaaagagattttcacccatccatgagctgctccatcacctggttcttgtcctggagtccctgctgggaatgctcccaggctattagagagtttctgagtcggcaccctggtgtgactctagtgatctacgtagctcggcttttttggcacatggatcaacaaaatcggcaaggtctcagggaccttgttaacagtggagtaactattcagattatgagagcatcaggtaaaaacagtaaacaaagaaacttcattgtttacaacagactgtggtgatagtagctgtttttaggccagaagattggttagcccaggctggaagtctcagaagtaaaagtccaaaataatgtcataaaggactaggtctgaaattcatgacaaggaaagttacaaaaatacaactcctggctacgcatggtggctcatgcctataatcccagaactttgggaggccaaggcaggaggatcacttgaagccaggggttcaagatcagcctgggcaacatagtgagaccccatctctaaaaaaaatttaaaaatccggccaggtgcggtggctcacgcctgtaatcccagcactttgggaggccgaggtgggcggatcatgagatcaggagatggagaccatcctggctaacacggtgaaaccccgtctctactaaaaaatacaaaaaaattagccaggcgtggtggcgggcgcctgtagtcccagctactcgggaggctgaggcaggagaatggcgtgaacccgggaggcggagcttgcagtgagccgagatcgcgccactgcactccagcctgggcgacagagcgagactccgtctcaagataaaataaaataaaataaaataaaaaataaaataaaaaaatcagacaggcatggcagcatacacctttaaaggctgaggtaggaagatctcctgagcccagaagttcaaggctgcagtgagctatgattggaccactgcacactggcctaggtgacagagcgaaaccctgtatcaaaaaacaaaaacaaaaacaaacaacaactcttttttttttttttttttgagacggagtcttgctctttcgcccaggctggagtgcagtggtgcaatctcgactcactgcaagctccacctggggttcacgccattctcctgcctcagcctccccagtagctgggactacaggcgcccaccaccacgcccggctaattttttgtatttttagtagagacggggtttcactgtgttaggcaggatggtctcgatctcctgacctgtgatccacccccctcggcctcccaaagtgctgggattacaggcgtgagccaccgcacccagccaacaactcttttctctagtcttgcctctcagccatctttaaatgaactgctttattctttttagggggtctaatgtccagcagcaactagactagagactacaggctttctatacgggaagctaggttggggatcttcttaagtaatttaccattgtgcttgttgaatgagccaagatttgtgtttccttagagtattatcactgctggaggaattttgtcaactacccacctggggatgaagctcactggccacaatacccacctctgtggatgatgttgtacgcactggagctgcactgcataattctagtaagtcactttagggacacaaatgttgatgcaaaaagaagcatccttcttcaaaggtctttcctgagaaaatttgactcatatcttctttttgacatttatattgagatttagttatttaactagctagctcctcttaagaaaatctcagagccaggtatggtggtgcacacttgtagtcccagctacgcaggaagcttgagtctaggcgttgcaagctgcagtgagctatgatcacgccaatatgctccagcctgcgtggtataacaagatcctgtttctaaaacacagctgggtacagtggctcatgcctgtaatccaagcactttggaaggccaagatgggaggattgcttgagaccaggagtctgagaccagcctggccaacataatgagaccccctctctataaaaaagaaaattatgtatcaaacaaagtaaacaaacaagcaaacaaacaacatctaagcctaagaacaagaagtgtgtttgtgggaggtaagtggagaagggaatttgggtaaaccgatctaagatatgggtggtccccatattaattacattttatcatttttattcttattttattatcattatcttttaagccacagggtctcgctgtgttgcctaggctggggtgtagcggctattcacaggcaccatcacagcaacccacagcctcaaactccgaattcctagcctcaagcaatcctctgacctcagccttctgggtagctagaactacaggcgtgtgtcatcatgtctggctttatcattattattgttcttgttactacaacacatattggctctactgtatttcagatattctcctttctcttattagtgtgtgtaatcttattgaagagaatgtacgtgttccattggattctcttgaaagtggttcaggctgggtgcagtggctcatgcttgtaatcctagcactttgggaggcagaggggagtggatggcttgagcccagaagttggagaccagcctgggcaacatggcgaaaccacatctcaacaaaaacacaaaaaaattagctgggtgtggtggtgcgtgcctgtagtcccagctacttgggaggctgaggtgggagaattgtttgagcctaggaggttgaggctgcagtgagctgtgattgcaccactgcgctccagcctgggtgaatgcagtgagtccagaaccagaccctgtctgggaaaaaaaaaaaagaagaaatagttaaatcgtcttccaactgacatttttaaatgtttgtggtgataatattattaattaaaatattcatcctaaggattaaatataatccttttttattccagagtcttccaccctgtttaaagatttcaagaagatggcaaaatcatcttacatttttcagacttcatcttcaaaactgccattaccaaacgattccgccacacatccttttagctacagggctgatacatccttctgtggcttggagatgaataggatgattccgtgtgtgtactgattcaagaacaagcaatgatgacccactaaagagtgaatgccatttagaatctagaaatgttcacaaggtaccccaaaactctgtagcttaaaccaacaataaatatgtattacctctggca

SEQ ID NO: 450 - DNA, 26988 bp, Homo sapiens
  source 1..26988: mol_type = genomic DNA; note = NC_000004.12:8592765-8619752 CPZ [organism=Homo sapiens] [GeneID=8532] [chromosome=4]
agagccccggccccgcgcggcccgagtgccacatcactgcgctggccgtccaaggtccgccgccccaccatgccgcccccgctgccgctgctgctccttacagtcctggtcgtcgccgctgcccggccggggtgcgagtttgagcggaaccccgccggtaaggccgtcccctgcccccaccctccaccctccaccctgcaacctctggggagtgtgatccgtcgcttcccaggggcccgggagctttcttccagtaggtcacgcgcctatggtcctggcgagaacgtctccaaagtgggcagcatgtggcctgggactggtagtgtgacctctcccctggacggggacaccagggaggctctctacggcatccaggccgggaccccaggcagcagagggtcaccacgcctgggccggggggtgagatctttttcctgtcggacacagcagcaggggcgccctgcaggtgggttcgagggagcaggtgccaggactttgcagggtgagaggccatctaaggtccccgggtctttccaggaacgggacagtctctctgggctgtggcaaactcttgacccctccctcccagctggggctgtgatgtggacagcaagtctccggaagtggccctaagggctgggagggggcgtgggccccctggagggatctggggcccggagagggaatggacgcagggatcctctgggaggtctgcccgcacgacctcacccaaggggtgtgcagcgggggtggggagcaggaaggtagaggctgggggctggatcctgggctcccgtctggcctcacggcctctccaggtgtgggggtgcatctagccaaccgtgctcaggactctcatcagaagcagacatctgggctcctgcgggagtggggccgtgtgtgggttcaagggtgcagggtgtcaggttctgaatcgcttgttctctggggtttgtggatacctgagaactgcctgagccctgcgagtggatgtgccaggaccacaataccccaccccagtgcgctgtgtcgacacttttcctttccgtcctgttgatgcctggattttcctcccacctctgctcctcgccttacctctgggctcttttctacccgctgcgtgtgtgctcatgcaggtgtgcaggtggggtgctgctggagcttgtgccgtgttgtgggtgggcctccccttggcccctgagagcccagacagtatctagaatcataggcttgttggagaccacagccccctcctccaggaagctctcctgacctgccctttcccaggaagaaatgcagcctcctcctctgcacgcaggcagcacagaccaccctgtcctcacccagcaggatgcatgggctggtctctgtccctggcaggtgctgagcacagccgtggcatcggcaagtgtttctgggagaaatcactcatcccccagtccagtctcccctcttatggacgagtgtggaagtcaaggacgtttccagcccacaggcagaagtgggcagagccggtcacctgcagtgcaggtcccccaccccgggctgccatgtccctgtctcgccatctgggtcttgctgagagcaagcctggtgctctctcctctctgcctcacccttccctggtggaagattccctgtcctcactggagcctggggacggaggtaattttcatgtcctagggtctgggattcagattctgactcctcaactctgctgtgtgacctgggcagatggcctgacctctctgacctcattcaggtctcatccctgacccaggcacagccactggtcagttgaggagggggaggactgacgggctgtcactcccctgttgaagaaatgctgccacctcgtggttaagaggcttagaactatttcaaaagccgctttcagaccagtgctgtccaacagaaacacaaagccatccacgcacagaattttatattttctagtagccacactaatgaggtaacagaaacaggcgaaactgattttaataacaaattctttttttttttttttgagatggagtctcactctgtcgcccaggctggagtgcagttgcgcaatctcagctcactgcgagctccacctcccgggttcacgccattctcctggctcagcctcccgagtagctgggactacaggcatctgccaccgcgcccaactaattttttgtagttttagtagagacagggtttcaccgtgttggccaggatggtcttgatctcctgaccccgtgatccacccgccttggcctcccaaagtgctgggattacaggcgtgagccaccacgcctggcctgtaacagattctatttaacccaatatgtccaaaatattccagcattttggcattcatataaaaattattaatgaaacacactgtttttagtactaagtctgaaatttggtatgcatttcacacatcgcacacattggtttgatcttgccacatgtgaagggctcagtggccacgtgtggctcgtggctgctgtactggagaccatggcttgagagccttctaggggcataggctttcaccccactgtgcgtttgcaagtctgcagggggatccggggatgtctgtgtcccacggtggttggggtggggaagcaatggtgaatagcctaaccagccacagtcgtcctggctttgctctgtggctgccagggcaggtgcggcctgggagaggcagagggtgggctttgggtcagcaggcccacccccgtgtggtaaggggcaaaaccagaggcctacggaggccaaggcagctggcaaaggcccagccacatcatgggactagctgtgtggtcttggggcagttgcagcccccgagggctcctcccagaccatcctgactctcttgtggccacagcagcacccactggggcttgctgattgttgggggaagaattgtgttttccagaaaagacatactgatgatgtaatccctggcacctgtgaatgggagcgtacttggaaacaaggtctttgtggatgaaatctgattcagatgaggcctcacgggattagggcaggccctaagccaataactggtatccctagaagaagagggagatttgggcagagacagacacagggacaaagttcacacatgacaacagaggcagggactggagtgctctggccacgagccaaggagcacctggggccaccaggagccgggaggggcgggagagttcttcccttagagccttgacagggagtgcggccctgcagacctgcagacttccagccttccagcctccagggctctgaactgttgttgcttttttttttcaagatagagtctctctgtcacccaggctggagtgcagtggtgtgatcttggctcactgcaacctccacctcccaggttcaagtgattctcccacctcagcctcccgagtagctgggactacaggtgtgtgccaccatgcccggctaatttttgtatttttagtagagacggggtttcaccatgttggccaggctggtcttgaactcctgacctcgtgattcacccgcctaggcctcccaaagtgctgggattacaggtgtgggccactgcacccggctgttgttgatttaacctaagcatggtgggcgctttgctagggcagccctggcaaacaaacccacccctctctgtgccttgcacatggcggccagtggaagtgggggtgacccagccagcagacactcttcctgccccttgggaaaccccgatggggctgcatggcttattgtggggtcacaggggatagtcctgctcctgcccacgatatgccccaagactctgtgtgttgagcattcactgggcacctcaccctcctgttgtattaatcttgatggatcctccaacagccctatgaggtagacgtgatccttatcccaatctacacatgaggaaactgaggcacgggcagtggttcatcctggagtcttagtgccctcatctgtgaacaagggagactggaagccacaggaagccaggaaggatcgcctgtccagtccctgtgtgatggtccagtcacttgtgtgggcgcttggtggctttggaggagcaggtgcagggatggacacctcaccttgtagctccctgaggccagcagagttcccagggtcaagtcaaagttagttcttccagtcgctcatgtctgctgagtgaataaacaaagttccaggttcacccaagctcgccagctcagggccaggccacgctcagtgccagccgggcaccgtcagagccttgtgatgggtacccagggagtggagcaggggtgctgggctgagatcaccttgacccttgagctgactgtgctgtagcatctgcctcggtccaagctcagtgcaggatgagaccacgggtcagctgagtgcaaaccctgctgccagagtggccccactggtggccagctttgcacaccggtgctcgctcagggccctgcacaggatgggtgctcacacagggccctgtgtggatgccagccttttatctgctcttcccaacatcacccagttgtctttagccacactgacaggggggtgagggcacagtatttcaagcagaatcccggaccagcttttttttcattccttttttcctaaagttcaagctgtcatgcctcctttatgctgcagattggtggagtctggggacgctctgtctggaccatgaaggcctgggagtcacgtgagggtgccagggagggtgtctggacagtctcacgcccacaggcccgtgacagtcatccagggggactcaagctcctctgtgctcatcccagcgcgcgttgtgggcgtccgcgggcatggacgggcaggtgggcacactgcagcacccctcttgggttagggccgccccactcccaggtgctttaggaaaacagtgcccttgcctgctgctctcccacactcagcacagcagggctcctgcagcttgtctccgggttgttctgaaaccatcgcaggaatgatgcacactgtggctgatggagcctcttccccccggaagatcgtgtgctgggctcggaccataggtcgtctcatctcacagtattcctacaaaatgattataatgaacccatgtgaaatgggggaaatggagacacaaaagagccacttgcccggggcccccggctgtgatgtggcggttggcacctgggcccggtggtctggggctgggcatcttccctgccttccacagcccttgtggttcatagtccatgttccctgccagcttggacagggagggagagtgagcccaagggcagccgtgtcttccccagggccgcccgcacacgcctgttccacgcccggagagcgctgtgtggacctcttttgtcatctgtgatgaggatggaaacgggagctctcctaggagtgcctggtggaggactagtgccctaaacgtccccatcccacaagagctctgtgagctgaatggtgtagggatccaggactgtggttgcccagtccccagtggggaaacccagtcccaggaagttcccgagggtgggagctgcctggccacagagcagcccaggtctctctgacctttggagagttgccatatgctcagccaagttttcacagcccccagatcctagggtgagctccgaaaagcggcctgcactctcctggcctcaaggttctgtcccaggttttggctggaggtgaagtcacagccaggcaggcaggccttttcctctgctccagcctgcttgcccccttctccctggccccctgcacccactccacacgtcctgcctgtgggtcacgtccccttctccgggttcctgctgctcccactgcccagcctgccccctctctggccaggtgggctccggcatgggcccgtcccagcactagccgggttttaaatctgatgccgggttccccgccttggatgcgttctcgctgcctgatgcacacagagccttgggtcccacttcatacagggcccttagcagccagcattgcttagggttggctgtgtttggccttctcagaggccttactgttgggttcacatgtctgggttcagaaagggccctcgaaaccccacgattgtgaggatggttttgtgtgttgatcctttgttcttggaagagggcccctgattcaggaaatggggagaggccacaccctggtggtgtccttgggggcacggagcctgcgtggctgactctgggaggggcctgggtctgggtgcagcagtgcctgctggtgagggctccgggggctgacagttaaaacttttggaatcttctgaggactcagcggcttacggtgggaagcttgagattggccacagtagaggtacttgtgccccagcactcacagatgccacctcagggctcttctgtcctggacatcaggcttgtgggcaccatggcccagccccgggcttcgagccagatggatgccactgacgcctgctgctgcctgtctgtccttaggcaggtcatgtgacctctcagacgcagctttcatgcctgggaaatgggggtgactgtggtgtctgcctcaggggctgctgtgaagactccatgagatggagctggcggagggtggcctgggctggtccctacctgcactcagggccctggccgtgtgttgcccggtgagtgaaggatggcgaggcaggtccctaacagtgccatgtctctctttccaggtgaatgccacaggccaccagctgcagacagcggtacagtaccgggacctccctggcttctgttctgtaggagggctgcagcccccacactgtcagagcactttaggcagctgaatccgtgatttcagaagtgggtaatggataacacagcccattaatcaaactagaaccccctcgtaaacagccagagaaaaattagacataacaaaaaaagaccagctaggaaaaggtgcaccagcttcccaccgggctatgcccaccccagcccctgcagagatgtcctctccatccctctccagtccccactgcagtcacacgtcctgcatttgggccttgtccacatgcatttcatggtcactggctctgtgccgggcccctgctgagtctggggtttgggtgagtcacctcccccgccaggccccgatttcctccttgtgacaggaggagtgctgaacgaatcttgtgagatggtttcaaaagtgacgtgggagccaaccaatgtgaagtgctcaggtcagggctgaggacagggctttttccctgaaaggggcaaacatttcattgtcgcctcctgacggatttgggcatctggtgtattctaagtggaggctttcaaaatatcagaaaaaaaattctgggtaccaagtcaatgacatatgtaaaatgtctattttattttattttttatttatttatttttatttttagagatggaggtcttgctgtgttacccaggctggtctcaaactcctggcctcaagtgatcctcgcatctcagcctcccaaaatgctggaattacaggcgttagccaccttgcctggctgtaaaatgtggtgagcagggcaatgtgaggcagaaagaatcctgtcctttctagactttgacatgagacgtggcaaaatgtcatgacttgtcctatgcgatgccacatcgggaaagtccagctgaggaaaagaggagaaggccatctgggggtgcgagtgtggagccagcggctgcggggacacagtcagctcccgacggggctggagggccctgctaggccgatgagggccttaaagatggggcttttggagctaaacaaacagctgtgatgaggaagcaggaaggtgcccagcaacaatgaggaccctaccctctgcctgggcttacggcatccctgcgagctgcagagcagagatgagccggctgagccgcatctgtcattatccacttctcatccaagtcctgagccccaactgacccattagggtccccaaagacactagacgcccaaagcaggatgtgtcttttgggacgtctttgtgctgcggctgtggctcctgggtggtctgtgcctgtccctgcctaatgcagcatcagctggctgccttcacgggcccttgtgtggcacagctgctttgcagatggagacgccgaggctcagggcagcctgctgcggctggcttgctggtgggtagttgaatctggttggtcttaggctcctcctctggtctctcacaggctctgattcctgcacagtagctgttgtcctggtcctcccctgccagaccgtgggtgcccctccctgcaggccctggccctgcgtggggtcccctacgtaaatgtctgatgcgtgacggtcagggccactgcaggagggactgacctgccgaccctgcctccccagccacctgcgtggacctgcagctcaggacctgcagcgatgccgcctacaaccacaccaccttccccaacctgcttcagcaccggtcgtgggaggtggtggaggccagctccgagtacatcctgctgagcgttctacaccagctcctggaaggccagtgcaacccggacctgcggctgctgggctgtgctgtgctggccccccggtgtgagggcggctgggtgcgcagaccctgccggcacatctgcgagggcctgcgggaggtctgccagcccgccttcgacgccattgacatggcctggccctacttccttgactgccaccgctacttcacgagagaggacgagggctgctatgacccgctggagaagcttcggggtaagggaaagtggcgggggcctgtgtggtcatggggtccaggtggtcaaggaggaccaagagccacactggaaggaacttgagggcttttccatcgacagtgacggtgcaggcattggtagagggcggggctgctccccgaggcagcatgttccccacaaaagggtgccaggcagggtcgggggctcagtgcagatggaggatcctctcgctgcccagggccccctagcagaagtctccagccccttagaggcaggctggggtggaagggtgctgagtccaagtgggggcagtgcccccgcccagggtgcagtgagcaggcctcgtgtgggggagcctgggctcagagtgcagggctggccctgggggtccagtcctcagccacagaccctccagaaccatagtgcttacccctggtcaagggggggcggggcatttacatcccccgggaggtctggcgggcaaagcttcacgattgctcatcgctgggcctggaagatcacacagagggtttggcttggagtgactcctccaagcagggtctgcaccgccctgtgggctcaaggagggagaggagctgtggagaaatgctttgatgtctcttgcagatgaaacagtggagggggagtgggcaagactgggccaccatgggccacttgtctctgaggtgtgcaaagaggtgccagagggccacttggcagcggggctggttgggggccctgcatggagtcccctgtgtctgttgtctcacgagtcggtgtccaccagagaccctgcatgatccgcagcagtcctggcccgttagacctttctgtgtaaaagaaatgttctattgtgttctgtccaagacagttaccactggccgcatgtggcccccaaggcttgggatgtggctcttgccactgaggcctggatgtgggcgtttcatcgcatttgaatgagtctgaacctgtctttgaagagcctagggccagtgtgtgccacattcaactgtgcagggcagtgtccgctcatggttgggttcagaggatctgactgcgggtgccacacatgtgctagctcacgcgagtctcacgacagccttgctccatggaagaggaagtggagcctcgggaagggtgacagcagtggggtctttagctggagtggcccaagcccattgcggatggagggatggatttggccatttgtcaaacagctaccgagcacccactgtacatgtggctttgtgctgggacattgaggagggcaggagaaggaaggcagacaaacacccgggccgggctccagcaagccctgggttccgggctatgtcaggtgctcagggctgaacctggcatgtcttgcagcctctggctcccaatctgagaagggtggaccctgggctcccatgcgatgcagcggtagggggggtgccctttgccagcaggtgggagccgtctgtctgcagagctcagtccctgtagaggtggtggagctgcctgtgggaggccagggaggcgaggaaggaagccaagcccacagccctgggaaagcccaaggagtcggttggagattattttgggcatctctaccaccaaattgccggcttcctctgctagtctttcccctggagaaccgttttgagcagaagcaaaaccacagggcaaggagaagcttagaggagcacattaactctctgtggacccaggaacagcctgcgggcacctgcgtcctgctcctgtgggcctgactgctgcaaagcccctggcggggtggagggagctaagcgtcatcggggtggccctcagggcacctctgttctagtggatgacaggatggtggggaagctggtgcgtatgtggtgtagagacgttcgtattctagttccagaacccctccctcttccccagcccccttttttcttcctcccccaagtacttcccagagcccccctttctgtttccttcctggacaggcactcactgttgtaccgatgaggttgtaacagaaacactgggaagcctcacagcagccggagggggcaccacaaggagccttcctgtttccaccattagccaagcaaatgaagcagaatactgaactgcctgagtgccactgtcatggaaaacacgcccaggaaaatcccctctgcacacccagcaggggtttgccttggggggtccaggaccccatatatctgtcttcctttctgttgtcctgctccgtattttaggagcttcccacagtggccccatagtatgtttactcacagtcacgttaggaaccatggcgctgtgctgtgtacatacctcaggtgccgtttggcttagatatcgttgtaggcactgcagagggaactctaattaaagatagagatgtccaagcatggctgtcgtgcagaggggactaagggtgctgtgtgtggtcagcgttcccaggcagtggtaggaagcctgggggcctgacactgactgagcccccccactgctcccccaggaggcctggaggctgacgaggcactgccctcagggctgccgcccaccttcatccgcttcagccaccactcctacgcccagatggtgcgtgtgctgaggcggacggcctcccgctgcgcccacgtggccaggacctacagcatcgggcgcagcttcgacggcagggagctgctggtcatcgagttctccagccgccccggccagcacgagctgagtgagtgcccttgggagagcctggcctggccccgtttcgggaaagggcttgggccgctccaccttcgggtgcacaagttggtggggtgtttggggtcctgggcagagctgggggcctcagggagctgcttggtgcaggccacgtcccgctgggcatgtgcaaccactatatgtataaagaagaatttctccagatatccatcttacttcaaaatgtagggtggcagactaggttatttcataataatggagacattgatctagtggctgaaaagatataaaacaaacaagaaattttattttatttttttgagacagagttttgctcttgttgcccaggctggagtgcagtggcacgatctcggctcactgcaacctctgcctcctgggttcaagcaattctcctgcctcagcctcccgagtagccgggactccaggcatgggccaccacaccaggccaatttttgtatttttagtagagacaggggtttcaccatgttggccaggctagtctcgaactcctgacctcaagtgatccgcccagctcggcctccccactcaaacagaatcggttattttagaagcagcctccatttgacccttggtcatcaccagttactgaaaaatgcacctgctctttgtttatggactcagggccttttcagtgctggcagcctcagccagtcttcatcctactggtctgggcagcatgaacaccatgagcccaaaggctctatctcttaccaggggccagaggccacctggccacaccctggcccccaaggctcactatgttccctctccaactgtaacatgctctgggcaggaggcagaggctctccctacagcactggaatttgagggcaagaggtgcccctgtgcagaaggccaagggaggtaaccagcgcagaaagctcccaggtcatttataccccgggatgtggcatctgaggaacacgggtgtttcctctcatccctggctgtccctgggccacacacagctggggagggagacatcattttccaggggagcaagtgcgaggcttagagaggaggagtgacttgcctgcagtcacacagccagtaaggccatggggcctggtccactcttcttcctatagtccattcatttattcatccatccatccatccatccatccatttattcattcagccattacacatccatccatcatccacccattcattcatacatccatgcatccatccactcatcatccatccatttatttacacacccatccatcatccgtccatccattcatgcatcaatttatccattatttcatccagccattattcactcatccatccatcattgatttatccatctatccattcatccatcattgatatatctatccatccagccatccagccagccattattcatccatccatccatccatccatccatcattgatatatccattcatccactcaagggccaaccaccttcccagctaagtaccaatgtgcactttgacttattacacaaacatgaagagagaccatcagttaaatttgcatgaatcaatgataacatatattattcatattcttgagttatgctaactaagaattctggctaggcataaaaaacgagcttaacaaaagtgatgaccttgatgagacctcattatatacagaggttcttgagtcaaaacaagtatgaattggtcccagcccatctggtcattcttgctgagtgggggggcctcatgcctttggggacccccggctttgagatgatgccccaagtctctgtatttgcccccagtggagcccgaggtgaagctcatcggcaacattcatggcaacgaggtggcgggccgggagatgctcatctacctagcccagtacctgtgctctgagtacctgcttggtaacccccgcatccagcgcctgctcaacaccacccgcatccacctgctgccctccatgaaccctgacggctatgaggtggcagctgccgaggtgagcgcccagatgcctggatcctgtgggccaccgcccgaaccaccccctcattcatccatttatgagtagtttatcccagcagtgcttcgttcctgcctctctaggagaggagcattcagcaggtgtcgatactggcaaacccctgcttcaggggctggggagaaggaaggcactgagaattctaggtgaattaaaaaggtgatgcgtgtgatagaggaaaatgatggaaagggagtcgatggtgcccgtgtgtgtcagcggggggtcagggtagctctcggggaggtgggcaacgagcagagcaggtgactgtcgagggcgccccactcagggggagcagccagggaaggccccaaggctgtgacatcagcaaggagccccggggtggagaggaggccaagggtcaggcatgcccccgagctcatcacataaagccgggggaaaccgcagcccctggccttgaccctcagcccagcgtgagacccatctggaaggaggagggtggggtgtgctgaccccacccagtcgggggttggccatgttttcagggtgccggctacaacgggtggacgagcgggaggcagaacgcgcagaacctggatctgaaccgaaatttcccggacctgacgtccgagtactaccggctggcggagacccgcggcgcacgcagcgaccacatccccatcccccagcactactggtggggtaaggtaggagccgccgctgcccatgctggtctccaccaaggcatccaggggtccctagttattccaggctctctggagttgtccttccctggggacaggagagcctggtgctccctccctgcctcagttacctgtctgtgaaatgggaacacctccttgctggggtgttggtgagattcagagattcatgttggaaacgcctagatccccgcaggggcccagtgatgggggccgagtccagctggtgcgttgatgtagagaccgttaatagtctgcaccattggagcccagagggctgctgaagcccagggcatggctgcgggccagtgggaaagcccagccctgagggcggcctcgtctgtcctgggcaggtggccccggagacaaaggcaatcatgaagtggatgcagaccataccctttgtgctctcagccagccttcatgggggcgacctggtggtgtcctaccccttcgacttctccaagcacccccaggaggagaagatgttttctcccacgcccgacgagaaggtgagagggctgtcgggtgtgtgcaggggagggagacagtgtgcgcggtccccttggagctggtgcccctccagtcctgagctcagtgaaggcaaagctcctaggaacctctactcagagcgggtcagcaccacctgctccaggcccagctctgcagggaagccccttcctcctggaagtctgtggcctcaggggccgtcgctcccctgatctccccgaggctggctgcactgtctttcacatgtccccgtctgggagctcctggggtggggaccctgcctcagcgctgctgttcctttgagctccgccccgcgcctggcggggtccccagtgcttcccaccgcagaggggtgcgtttccgggaggcgccggcagagggcagtgctgcagcgcgcatgctgcccgcccgtcctgcttcccgggggtcgtgcttgcttctcacgtgctgggctcctccggatggggaaggagttctggtcccaccgtccactgggccattaggtgaggccctcccttttccgggcctcagtttctcctactgttcgtagagcagcgggcgatgagacccgtgatgatgctgggaccctcccaacccaccctaaccttaggacgacctgctgggggagggcgcggagttggtccgttcccacactgtggataagaaagcggaggctgagggaggggttgtgatctgaggtgggccccagcctccagcccccagcccccagcccccagctgcggatcctggagcttagctgcctgaactgcccctagtggtccccactccaccggaggctgggcctgccctccacctggccccttgatggcccagagtcgctccccaggcttcgcgtggagagccaggcctgccctccacctccctccctgcactttcccttggtgtttgggggaaggagcagggagagagggactggccctgggtgggcaagtgccaggtgccgggcccctcataacagcagtcacacatcgtttgttctcctttctgaggccacccggccgagcacatagctgggcccctggttggcactcaggtatcagccctgcctcacctgggcccctccctgtcctggggccatcattgggaatgcaaacgggactggtccctgcgctgggggtcctcagtctagggtgggaaatggagccagaaactggcaaggagaagactgccagggctgcaggagggctgtgagtgcacgtgtgtgcgtgtgcatgcatgtgcacacgtgcatatgttggggtggggaacccccagcctggtctgggacttcaggagggcttccctgaggtggcggtttcccaaaaggtctccacaggtgaggtagagatttccagctgcagggcagggaggggcactggaggcacaggccacctggtgcagagaccaaggggagccccagggagccgggtgcaggggcccatgccgagtgctgtggcccagcaggaatggggagagcaagctgagcactctgcagaccaggggcagtgacagcaacacctgggccaccggcgcatttgtcctgcatttgttcattcttccacccattcactctttcacttgttcatcattcattaactcactccttcactcacccattcactccctccctccctcactccctcactcaccactcatacattcacccattcactcactcactcccttcctcactccctcactcattcactcatttactcattcacccactccctcactcattcactcacccattcactcaggcattcactcactccctcactcacttactcattcacttactcactcattgtcactcattcactcatcactcactcattctcttattcattcacacactaattttctcagtcattcatccattcactcatgcacttattcactcactttttcactcactcattctctcattcattcactcacaaactcattcactcactcttattctttcactcattggtttattcccgcactccttccctcactcattcattcattgactcttgcaggtagtgcacaccaagggtgcgaggggtgaggtgtctggttctctgctcagacctctgcaagtgcccgcagaggtgactgggcggcctccacttctggcctggccttgcacccctgtgctcttgggggccatggctgggcagggcaggtgtccccctctgcacaggcccagtgtgtctcagcctcagagctggcagggcagggcaggcatcccctctgcactggcccagtgtgtctcagcctcagaaccagatgtgagaagacgtccccaggggggatgttcaccccagtgagtcccatcagagccagagaaaataacactgtttccaagccatcaatcatcgggcagtgatcatgcagccctgtggccggcagtgatctctggaaaccagggtcccaggagaggcctgggtttggcaggggagcatgagaggggctggctggggtgtgccaaggtaccctttcaccaaacttccatggtgccctacggacgagagccagtgcctggggacagtgttcaaggccctgcaggctggccatggctgccttttgctgctccacacgtgcccctttgcccgaatcctgctcatgctgtgtcctgcctgccaacccctttctggctttgccaacgcttgctgtgggaatgagcatagccagtttcccaagggcttcctggggcaggagctgggtgggctgggtttcccacggtcctcagcctgtgtttctgggtccccattcagtcccagcttccctgctcccgcctggtttcatttatctgtgtctcttccttgcccatgtgcgcccagcctctggaccgacagctcctctgatgtccttgtcctgcacctgccctcccaggtcaggcctgtgttagccagatctgggcccctgcaccccagggttttggggactggtggtcggcagccaccttccatgccttagccctagagactgaccagtgatgggagggaggccccagggcaagggcagggaggagggactgtagggcagggaggccttgtgggtagaaagggtgacacggtgggttgggtcaggagcagactttggagagagtcttgtcccaccctcctaccccccgaggctacaccctgtcaagctgacggataaaggcaggtcagaggtgggacacaggtagaatgtagcagatgtggcctgggcagatggaccgtttgttggatgtgattcattcttgatgggaaagtccgctgaggcttcctgctatgaggcagggcaggccactcctgagctgatgctgccccacccacaggtgcaggggctgctggcaggatagtggtccatggtctgccaccctggaaccacagggcctgagtggggttgtgtttgtgcccttggtttgtgtctgtgggactgagtccagatggcacagcctcacttctgagaagctggacccattcctcaccaaccccaaacctcacgtctgggagtccgagtctcatgacccccaccagggagagatcttcactctggcctggagcaatcactcattcactcagtcactcactctttcactcattcactcactcattcactcattccctcactctttcacttgctcacgcattcgctcactcactcattcactcattcattcgctcattcactcactcactcactcactcactgggccctgcctgtccaccctctagtgtcctccactcctcctttctgacagagggagccccctcctcagcacagacctgtcctgcttggtggggccctgatgagctcatgcagggtgagcccttcgcctgcctgacccaccaggagcctctgcccaaggtcagtctgggacttacagacggcccagagcccccacaaaggaggatctgtggactctgcctgggggatgggcacaatgcggggaagctctgggctgggaagggaagcctgtggggagggacccaggatcccagccacacatccaaacatgtcaagggtggcagatcctgtgagctgtgttctgtccctctgccaactgcagtggaagctggagggtggggtagtcagggaggggcttcctgcaggctgagtcccagcctctgatggtgctggtcagcctggaggtggagtggggtggggaatgaagcagtgattattcatagaagtagttggctttggagatgaagtcggggaaaatgcagcccacccttgccttcactgctccaacagcctgggctttataaactgtcaagccaacctgcacacaccctgtggacaccatgtctgtgtgtaacctcaggagagaaagcccacactacccggccaggtgtgcagagtctcggtgattaccccagttacccatgggacctggccccgaactccagcagtgccagaccgcctgtgacccacctctgggccttcacatacactgtgtcctctgcaggacaccgttcccctctcctacctgcagacaccattcccctctcctatctgcaatgcaggtgtttgcacgcgcagctcctcccctcattgaccccagctcacaggacgtcctgcaggggaccctttccttatctgagccaggtttcttttccagatgttcaagctgctgtccagagcctacgctgacgtccaccccatgatgatggacaggtcggagaataggtgtggaggcaatttcctgaagagggggagcatcatcaacggggcggactggtacagcttcacgggaggtgcggcttccgcagggcgggactgggcggggggtggggggtgcaggggctgggtggggcaggggcaaggcgtaactccacggtctgctgctgggatccagctggagagcccggaagacagggcgatgcctcacctggtggagaggaggctggcgtgagttttgtttctgtcttgatgaaaagctgtcgtgtgactgttgtggaggacccaggcccgtggctcctgtagtttatttcatgaacactcaaatgtcacggtttcacccatgaccaatacctttgtgacattagggaagtggagttgccagatgaaatgctggacttccagttaaattggaattccagagagaccgtgaggaattgtttttaggacaatgtaaggatgttccaatgcgtgggatatgcttacaagaacccgcatggggtggactgatactacaattgtatctgtggtttctctggagcccgacttgaagcgtgtacatctttatctgctaaatttgcccttggggaggctgcacaggagcaatataatgggcatatgccactgtgtgtcctgaggggtacccgccagaccaggcacacatgctctgggccctgcctgcacctctccatgccggcacatcacagatgagagcgctgggctcagctgagagaaggacttgctggaggcccagggccacaggtggcagagccaggacccacgtggcatccccttctgccccctcttcccatgcaggcgggcagagaaggtggcacttcttgcacactctgaagccatcttcgcagcctgctctgaaaacttttctctcctgctcaatggttggcacctgtgatctttccctggtgcggcgcagcctctctcccttccagaacccaggcagagggccctcagcccccgtcatagccctgtgactggggtctgcaacagacacccacgagcagagctgggagaggcccctctctgttcctttttttttttttttttgagacggagtctcgctctgtcaccaggctggagcacagtggtgcgatcgcagctcactgcaatctctgcctcccgggttcaagcgattctcctgcctcagcctcccgagtagctgggattacaggcgcccaccaccacacccagctaatttttgtatttttagtagagatggggtttcaccatgttggccaggatggtcttgatctcctgacctcgtgatccgcctgcctcggactcccagagtgctgggattataggcgtgagccactgcacctggcctctgtccctcttgcccctgatacggccctgggaaagcatgaagccggggaccagagctagctggaccagagagacggtgactgtggctacactggggtctgggcagggactgtcaacagcagctgcaggctctgcggctcaggagccttgaacttcagaagggcgtgggctccctgtggcccccgacacagccagccctgtgggtgctatcatcctaggcctgccttggagatggtcatggcttctgctgaacaagaagctccaagagcagatggcacagagggcagaagcgggtatggctggggtcgacccagcttgctctgaggccttctcggctggccaggtggctggttgtccaccctagcctgggcccgtggtctccctgggagatggagctaataggaccaccctcctagactctggtcaggacagcgtctgggtaaatggacattgtcaccatggggtctccaggccagcagctgggatgccaggggcctgtgcggctgccccgtgctgtgggcttttctgttagaaaccgattcatccctgacctcaccagagacagcatgggggtggggaagcctgtggactttgccgccaagcggcctgagctcaagatgcagctctgcctcttcccattgcgggacccttaaatgcctcatgccgccatctgcggatctgcaaagtggggatcatatggtccaccttgcagttgttcagcccctcagctgcaggaggggcgtctgtggcgagtacctgctgcactcacctgcctgctgggcacttggctgacaccccgacgtcccggctgtctctgcgcggctgacaccccggcgtcccggctgtctctgtgcggctgacacccctgacgtcccggctgtctctgtgcggctgacacccctgacgtccccgctgtctctgtgccacaggcatgtccgatttcaactacctgcacaccaactgctttgagatcacggtagagctgggctgtgtgaagttcccccccgaggaggccctgtacatactctggcagcacaacaaggagtcactcctgaatttcgtggagacggtgagttctgacggtctcagggctctggtccagctgtggcctgggtggggtgggtcacattcaggcccccagggcagcccccgtagcctcactgccccatacacacatgctccttttgccaccacttgttttggggttaactgtccaccatgcacaacttgagatacagtagccggctctcctttgcgtgctctgtgggtgctggggtggcggtgccatgtgttggagtccctgtgagcaaggatgttacagcctaaagcagcacaattaaacaagggagcatgggcctgggcagcccggcgaggtgtctgacccagcctcagaggctgggggggcttcctggaggaggcagccgcagggcttcatcttgaagaagggtaggagaaatcaaaccacaggacagggagagctcccagcagaggggagcatgctagaaccccaaggggacatcaaaaccctcgagagccgctggggctgtggtgaggactcgagccgtgggatggggcgggcactgtgctccaggaggcgcagaagtgagggctctgggcagtggggtagctgtgtggttcaggcagggttttggggcctcagagtgaagggtataggcaggaagtggctggcagaggctgggggcggggcagggcgtcctgactgaggggtgactactatcgtgaggctgaggtcacccagaagcaggcaggtgggaggtgagtggggatggctgagaatgtgtctaaaatgaccccctcgctgccccagagagccaaggtctccctagcactcagtgtgagagtggggactctgtgcccatgtctgctccccttccagcacagctcacaccgagggtgctggggaccccaagaagggtccaggatgtcacagggaaggcagcctgcgttcgaagaagcttctgctatttttttcccaagcgttttcaagaatcacataaattgcatatgagcacagatgcccagtgagaagcaggcctcagaaagagggttgagctgcagcagcaaggagaggtgagggcgcagcaccgtacagttggcgcccacccacacagggcagccggttctgacaccaggccgggcggcagacggggccgtcccattttatagatggagttgaggttctggcctggggtctctgggccacacacaggcttgtgctccaggctcccaatgtctgcgagccagccagaggaggagacagagggtcagagagtgacatggcctgtctggtgtcgcccagatctgcttcttcccaagccctctgtccatgagccccctcctttctagaaaaatcaggaaccttcctccaagtaagaatcgagcgaactccctggggcagcagccgctgagataggaaagaaacaaagccccacacaaagtaaaatggaacattctgccatttgagtttctttctgatggctgtgccgcagccctgcaccacctgtggcgagtcccattcttctatgagctctcgcgccaggcctgtgcacattgcattttgcggctgtctgatgaacatgaggttgaaggagcctcggatgtggctggcattgctcctggatattacacatgaagtcttgggatatgaagatttacagcaagcgtggaccttggaaggctgggcagctcgctggctggctcttgagacggacgtcttacaggagacctgggcgcgggctcctgataaggatcaagcctgtcgtggccaattgaggcttttttcaaagtgatcctggccaggcctcgggtgggagtctacatcacctggggcgaggggaggggcggcgtggcagctctctttccccaccagagaaccgcatgtgccctgtgtttcatgaaggtgacccgtgggcccaagagcagggacagaaaaaaaatccgtccactgcaggctgatgctgagggcctcctgtaagagaccctcctgggagagcccctgctctcgggtggggctaggggaggcagaagtgagaccagggctggcagagaggaagactggggccgtggggccctggggtaggcccccagtgtggctggtcatcagggagggcttcctggaggaggaggagtgtgagctgtgttttgaagggagggaaggaatcggcccggtgaggggctggtgagggtattcttagcagagaaggctcagatgctgtctgggggtgaggaggagccacagggtggggtggctgaggggcatggtggcttctcgagctgtccagtttctcttcatcacctctcatgcaggaaaaccttactttttatgctctccctcccgctaaatgcgagtccatgagacattgtttcaggagtgcggttccattaagcagcgaagtgtggacaagagcatccagggtgggggtcacgagccccagagggcagggggcagtggctgtcagtccctctccatcgcgtcaggagggctgggaccccttgatgtgctcatcatggattccatgtgctctgggttcccgagatccctgtggcacagagataagtgctagcatgtgctttgtggagctagactgggtgcccactcccctctttcagccacctgcaccactgacagctgggcgtgagcctggaacagcagttaggtgccacagggtctgagctcacgggccgcgtgtgtcaggccagtcggtttctgcatcggtcacggcgggggtcagccgcggtgggattagagttcacatgcttgctgaaatcatcggtcctgcagaagccagagctgctttggcctcatgaacattttacagctgaggaaactgaggcacccagaagcaaaggtttgtctgaagtgaacagtcactacggcagagctgattttctggcccagagaaaaaccagcccctctcgggctaatgtcccggggccagggaaggaggatgctcctgttgccagggctgcttcctgaccctgtgggcccaggctctttgcttctgtggactcctccctccatataaagtatttaaaattatacaacagtcgacataaagatgaatatataggaaaacagtctctccaacctaaaatgttttgcttttatcctgattttaagaggagcaagatcattttcatagtttctggaagcacagcagggcctggctgggagccctttcccttgagaatctgttgctgctgagccccgtgcagggcccgggcagggggcagcctcgctggacggactcctctccccacaggcatcctggtcctgctcagcgtgaccttcagcatccttggaccccacgttgttttctgctgactagagcaggggccgtgtgggtggtttgtcatcaactgttttacaagaaatgtggacaggatcaggcagctttgggagggctttccagggtgaaaacgttggagctgtgggcgtgcagggagcttgtgtgttcaggaccagttcgtgccaaggccaggcaagcagtaagaaggcagggcgtgttatacacgtgtacgatgaagaaaccgcgctgctcgagcgagggtccgagcactgtcctcgtcctctcccatgcccacgccaccttcaggagcctcagctcagagggacccagggagtcccgctggggctgggaaggcagggaaggaatgccgatcaggcagaagagtggcaggaaagggttctctgctcaatgcccatagagatggagtcagccaggcctcgggtgagatgcagggtcattcaaaagcccagaacgtgctcgggtcaattgccagggaggaaactgaggcccagagaggggagtgactgactcgttaaagatggcagagcgagggctggcagagtggggctctgtggggtagttccccctagataccaagctctgaggagcatgtggggaacgagctgacggcctccacgctcagcaggagagctcacgccatctccctggcctccccttggtctcttcaggtgcaccggggcatcaaaggtgtggtgacagataaattcggcaagccagtcaaaaacgcccggatctcagtcaaaggcattcgccacgacatcaccacaggtgagcacgtccctggctgtcccctggggaccacgtctgccaaggaaatgccacaccgtggcagccggcaccctcaggcactcacagtgtgcccagccctcagcaggatggctccattcctccccaggctggctgggtcggggagggtgggcaggaaccagggtctgcgtctccttacagcatttggtgagggaagagcttgcccagccgtagctactgaatgatggtggatgcatgctctgtattcctaggaaaatgccgcctcctccaacattgccggggagagccacctccacccctaagcctgtttgtttctatcccaaagttcataccctgttgatagctggggtgtccagccctgtgcgggctctggctgtccttacaggaatttcacagccgatgaaaaatgacggtatgctgtgatatgtgttacctggcagagatgtggtccagagaagagggggacttttgctaactgtggggtgggtatggggggtgggagtggtcatcgaaggtttcagagaagaggggtgcctaagcagggttttgaggtataaataagagtttgacagagaaaaggggtgggaaggacgttccaggcccacacagaggcaagtgcacatttggcgcctgcctcccatgctaacctctccccactcatatccatcacccatcaccccgtggctgggtctgcagtcctcgtgagaatcatttttaatctatttgtccacagccccagatggtgactactggagactgctgcccccaggtatccacattgtcattgcccaagcccctggctacgccaaagtcatcaagaaagtcatcatccccgcccggatgaagagggctggccgtgtggacttcattctgcaacctctggggatgggacccaagaactttattcatgggctgcggaggactgggccccacgacccactgggaggtgccagctctttgggggaggccacggagcccgacccgctccgggcgcgcaggcagccctcggccgacgggagtaagccctggtggtggtcctacttcacatcgctgagcacccacaggccacgctggctgctcaagtactagccccggccccagcacccgccaggatgtggagaccgaggcccatctccgcatcccgggctcctggctcttgattttgtctgccacagacatcccacaaagccgctgccattttattaaagtgttttgatccacttt

SEQ ID NO: 451 - DNA, 22788 bp, Homo sapiens
  source 1..22788: mol_type = genomic DNA; note = NC_000006.12:108166022-108188809 NR2E1 [organism=Homo sapiens] [GeneID=7101] [chromosome=6]
attcccctccccgcggctgcctgtcagagcgcttctggagatattacaggggacccagcccgcagcgacaggcacaaagtcacggggtaatgaacttcggggacccttcgccgctgcgtgcgcggctctccccggaaacccggacctggccgcctcttccctcggaagatttcccagcaatctagttttcccactctgcgcttgggttccggcagcgcggagcccgtctgcctctgagactgcggtagtgttttccttctttccttgggagaccagcggtcggcagagattgcccacactctgcatgcctatgtagagggagagatcgaagactgagtgacaggaatggggaaaaagagggatttcgctccgtaggaaggccattttcgtgtctccatctctgtctttcaacatccctctcttgctgttcttccttcttcctcagtcttcctgtccatctctccatctgtctgtccatgtgtgtgtccatatcaagcagcattcccagcagctgcggttttgcaagagccgggaagaaacttaaggatgcttaaatttccactgttggacgaattctgagcgcccagggagcagcgcagcgcgcgactgacacccacctgtcccgcccaggagccttgcaggctggagggcagctggagagcggcggcgcccggcggcgaggcgggcgctgccggccgggactcgggcagcgcccaccaaccgctccgccccgggacagccagcatgagcaagccagccggatcaacaagtgggtacctctcgggccgccgtggggcctaggcgcgcagcctggggcgagcgagcggggaggctgggggaggtcctgcctggagcgctgcgaatctgagcccctgagagggattccagcgggcgtgtgcgttcggcccagacctgtagaccgtgagttggagcatttcgtggagaggggagagccgtttcgttgcctctggattgcttgatcccccctgtctggtgcggtgagaaggttacgacccgcgcagcccaccagtcggatgagttgtctccatttagccgccaggtgctggatgggggggccatgggggcgggaactgggccgcagctccaggcggtagcacaataacacactcgctcaaaactccgagctccagcgcgcaaaagcaactctgtgcaaagcggattttgaatggaatgctttgcaccccgtttctagctatttcaaataatcctgcaaactgggaagcagaaacaatttaaaagtcacattttccttaatcctaaatccgcgtaggtcataactggggaatttaaagtatggcgaaccactctagcaaagagaggaccaaatccctaatcccaaggacttttcgagccggagcccagcagaggcaggagtgcgcggcctgctccctccgtgcgcttctctccttcctcgaacttccttagctgccggctctccgaacgccaggccgcagctgacctctcaccaccccgagactcacgagcgcagggctaagtgtgtgtgcgagggcatttgcttgcaccctgcctgcggaacccaagaatgtgcaggcccgagccagcgttgagcaggcgcggtcacggtgctcagatctcccgggggcatttcagttcccgccatccagtggcccacggctgcgggctccagggtctgaggctggggactaccgttgccgccgcagtccccatatcccgaagttgccttgctgcttgtgttgttttcgcagatagcatttttggcgctctgtgcgttccttccctccccctccccctttcactcgccctcattgtcctgagtctttgaaagttgggagaatcggagatacttctgaggactggtaatgaagtctcacttaagtgggatgcaattcccgccctcctacccccctccaagaaggaggttgtgttttcattttgttttgctttgggtgctgacctttaaaaaattagagcaaaatgaacgtgaacaaaaagaaaaggagaaatgtttcgagctggggcagagggagcagagaaggagccctcaccgcggccggaatgcagagcggaccctggcccaggactgggtttccctttaggctcgggcctaccctggccctcgctgttggaatctccaggaggtaaagcgacctcgatttttgttgcccgcattcccgggcgtgagtgtccttcccaggaggctcaggaggccgtttctgttgcattctgagcctccgttgcaaaaactgaagcccgtgggtctcggcaggcctcctagctcgctcgccccgggacaggccctcgcctacacccctggaagtaaggagccccgggctctttcgtccttttcggggtgtggagcccctggggcccttgaaaggtgaggcctcagaggcgagggaggggtgagcggggagctctgcccgcctgcggctgcgcccccgctgtggactaggaggcaggccaaccctccggactttgggggaaaaaccacagcgggctccttgcggaaactttggccgttctaacttgccaagagcctgagtgaggccttggaagcctccagccccggctcaggtcgggacgcggctgctgagctttctcaggcccgcaggacagcggcccccgccggtggcgccgctgcatttaggccctttccagaccggtggcggcagccaacccgagacttgcgtccctcgggcccggggcagctaggaggtcggcgcgcagcgggccgggtcaggactgggtcgagcagacagagctgcagcccccgccttgcccggcttctcgcggctggagagcagagcgatgtcacccggagccccgcctgggtggtaacgagaccctggccagtcacccctgcagcccagactaacttctttcaacagcctctgatggtaattacagtaatcgaagctgccatatatctttaggcaattatgacacacaaaaagccccgaggggaccccctggcgagggaagttaagaacggttttccagcttcaggaaactccggctcgcctcacgtcggagctcgctcggcttgctaaatgagaggagctttgcaacggggtcaaccagcttgtctcgtgaccccaagtcaccttaacgtggctgggtggcggagtctgaggcacaggcccgctatgccccggaattttcgcgtccctccctcctgggccccgccccagcccggttgcctgtttctaatctgccccgggagccgcggctcagaggtctgctcagaggcaggactcgcactggtggtggcctagagggcaacagtccggaagctcgggcgggggaatccgaggaggggcccccaccctgcactggtcttccctccaccctcatcgggttctccagagatgttgtcatgggcctcctgtccggatgggaagtggggaaaaagagaccccaccactgctcctcccactcactcatcttggcatcttcaacagtgccacagggaagaggacagctggggtgacagtactgctgggccccaaacgtggaccctggagcggtcagagggcgcgtgttaagcagaggatggttgtaagatatggaaaccaagtttaccgcttccagagtgagtgcagtgcagcggagctccagacccggttcctgagcgaccaggaactcccttgggcgcagtgacaggcccgaaggagtggaggacaagacccgctgtgcccttgcctggccctctccagcccctccctcccacagcacaatctcccctcccgccctgtgggaggggggcgccgagccggtggccgccgcgccgcgcgcctcccctgcccgcctttgtcgccgtccgaattcccatgctactctttttgacgggtcactggtggctctataggcaggtgctgccgcggggttgtaattacccggccgagcctggtcgttaccgaacaccccctcacccccaagcacggtcccccgcgctctccttcccccaccccctccacctgagacgagtctgggacccacggtgcaagctcgcccggacgcctcgggttccaggagcaagtttacacctgcggtgcctcgaggccctccccgcgccacgccctcacctcccctactcccctcgcccagacgttccactgccgccccttcccacctcaatcccatcgtagtccccaacccaagcgctttcggcagcagctgtcgaatttcagggaggcctgaggccgctggggcccaaactggaggccttcggataggtagaagaagagaaaagcaagtgttaataagtcaattgttatcaactattgttatttttaaaattaaagtgttaattaagttaacagtttaatactccctttgttttgcgggaggaagcatttctaagtccctataaaccgcttcaggcacttgttggactcttgaaccttagaggaaaagaatccctccctttctaaacggccaaatattaccctctccctgacactcctccagggtcggtggccaccccaggcttgaggggattccagggaaagttctcttgaggtggggtccatggggggtggggggatacagcctagagaaatcagtcagattcttaatttaaaaaaaaatcaggctcaaagagcactggaaaaaaccgggaggaagagatccacacaggaccaagtgtgtggaggccagtcttctagggagaaagggcttaggaaatggagggagcctgtcccaagctaacccgacagggaaccgacaacttgcgtcgctcccctctcccttgcctagtcccgaaccactttgcggagaaaataattttttcctaaaagaaataatttctctaaagcgactcaccaagcattttttaaataggtaaagcgaaagttggccaattaccactacccttattatcattaataatccaagtattagcattacaataataatcctaataataacaccgcccggcggagctcagagaaaactcgattgccttccagctgccatccctggttccagccgtgtttgtttttcttcttttcccttttacatttcaagtttgtctcctcgcgcgctcactaacaactttctctgttaaatgcaaaagcgaaggagggaggcggccaaactttccgcggagcagaaaggcagtggagggccgcactgccgcccgggcctgctgtcatcttttattccaaaatgggtctcggcgattagaagagaaccaaatacatgtagcggtgcatgaataatgctcattgtaggaaactgacacttgctcaaggaaaaaaagtttgggtataaaatcacttcattatttgcttttaccgcagcttcggtgctaatcccttcagaggtcagattgcttagcatctctctctccctctccccttttctccctcttctccgccctcctttccctctcgccccttccccccttccccgtctttcctgcgatttcaggccgcattttagatatcccctgcaaagtgtgtggcgaccgcagctcggggaagcactacggggtctacgcctgcgacggctgctcaggttttttcaaacggagcatccgaaggaataggacctatgtctgcaaatctggaaaccaggtaccttagccagggctgcactgctgggctccgctctgctgcctcctcactcttttgtttgtgccaaggcctcctctgagtttccacgcagttgaggagagacccggccctgacctctcccttcctctcccctccttcttgcctcaactcttggaggccctttggctggggaaaggcgggaagaggtaagggaagatatgagtttacaggagggagtctgaagtcctagagcctccctacacttttttaaattattattattctgaaagattttgacactgggtaaggcccacaccctgtggctctaaagccggcccaagggacctaaagaatttagcatctaaaccacaagtagcaagcaggagaaagagctttgttattgtgcctgcccaccccacactcactcctagcagcatcaagctcagtcccctgatcacttgcctgggatgcagaagtaagcggcacacagacatctgagtcaaggtcaccaccacctttagctgagaccaccaagtgagtgctagccacttggaagagaggccgtgctttctgaagggttgtgcattttcaactctggagaagcagggctgctctggaagtgggcagtgggaatccagcacccatgtgaccttagctatgccttgtcagaaaagggcagggtgaggaagaagagaagattcaaaaggaaggtgcaactgggaccctcctcaagcttccatatccctgtcctccttctctgcttagaatttgggcccagtcggttgttttggtcttgagtaggcagaactgtctcaaagagacagaggaatctggcatgggctgaatatgagccaaagcttctagaaagagtgagcagaacctcttgactcagtttccagctcaataataggctgattttaactaaggagatcaaccttctggtcctacactttgccctctccttatcagcgactcagaccctcagtacagagtcctccatttcacttgtggaaagatccctgagggtgcattagtcagcagtcatcctttggtaacaaaatagtaaaacacttttcactaattgatatatatagggtacatgtatacacatgcatatattgtctgctgctagtgaattgttctgacatctttttctgaagtcatgtctgctcatattgttttctaatagttttggattaaccacaaaaacagaagatatttgcattgagataaattttgagctctctagccctgttacctgtttaattggctactgtatcagtttctagcttcaccatatggacacatcacattttacacgcataggactgtatcccaataactccacaggattgtgcgattactgcgggttgtcagatttgaaccaacttctacttagattgtcttttgcttttatgcagtgaacagaattggaaaatcaagatctctgatgttgtgcttgatcttttagaaggggatggctatcaattcaagcatattgatatcagtccaagtgcttgtaaaggactgataatagactcatcaggcctggtgttcttcttgcaaggagagtaaatgatcagagctgaggcgtttatccttctctctggcgctagatatttatatacatttgatctgatttgaagacacacttaagaacttatgaaggtttccattttgcatttgcatacttataagaatactggaaagataccatctgaggatagatatataattacatttaataacaagttttaaaaaacctgtttacaatgaactattacattggccagcaaagatgccctaaataattcactttggacccaaaaattatctcctttctctcttattctaggattaaattatattccaatttattattaacagtaatgaggacatttagaaatggatatgaacatctgtcccacctttattttaaataaatcatcataatttaaattggagaagtgtgaactcataaaactgcattcgaatgtgtaattttcccctaaagggcttcagggggaagaaaaacatacttactccaactccagagtatatgaatttttgagattatgaagcaaaataaaaatacatttattatctttcttctcactacaaatctaacagtagcaacttctataaatataggagagcacacaatgtcttaaatattttctgtgtataaaactcatgcacatgactctttatgtatctatgcatatgtcccctcggtaatgacatctaacactgaataaattccaaaggaaactttatctgtagatttcctctttcaatggctaatgtttttacagaaaattgcattaggtaaacatctaatttctcatgcatctcagataaatatttctaaagaagtgactacctttattttttcagttactatgctaacagtctgagcccatattatcatttagtctgacagtccatcacattaccttcctggtcctgtttacatggtgagcatttctatattttgctcaagacttgagctcttcctttttcaccctcatcttctctaggccttgccctcctaaactctcaccttccaggaagggctgtgtttctatgcacctgggccgaggctagtctttaaggcaactctcaacttgctgataataaggttggcttcatacaaaagcaaaagtgaggtaataggagagtgaagaataaatgggagagatttatctgatagataaacgggctctcccagaaagtggcagaaagaggtagactcaagtactgaaagcagaaagaatcgttggtgggagggcggtatggtgtgaatcctgacccaaaagccagctcttaacggaaggaacttagtggcctctttctctggggccaagtcgctgtcttcggtcctgaagtctcgtccctgttccaccactccgcgactggcggaagttcccctagcgagagccccgcaggcctgcggggtctgccaaacccggctctctaagcttcacctgcttggagaaggacgtttcccccttgtccgctttcttggggtccgggactggccctcttgaagtagcctgggacgtcccagccccttctcgatctggccctgctcatgcccaaggccctcgcgttttgcaggcccaggctcggggctccagggcctgcggccgggcaaggtcgcgcctccacaccgtttccccgcccgggtgccggctccgggtctccagcctaaaggccctggggaccgctgacctcctgctctctgttccagggaggctgtccggtggacaagacgcacagaaaccagtgcagggcgtgtcggctgaagaagtgtttggaagtcaacatgaacaaagacggtaatcagtgcatccctttattccaatgttgattgagtagtaagtaaattatatgtacagaaaatacatggcactcctatgcatgtaaatcaaccccggagcgcttctttccagatgctgggaattggcctcgggctttcagtcgtatccttcccgtctttcagcaggagccgctggcgacccctagaattccccagggcaagacccatgcccacatcaggaacttgcgccccacagtcatctccacacaggcagcgcttggggggaccccactctccaggggaccggcgcgcattttctgcctccggtcctaatccctctttgcagcccttcgtggccacccttaagcctgctagcctgccccaggatcttaaaatctggatagtctcacggggaggagatcatacaggctggaagttcgcggtgtgttgaaaaagggagggcagagacgcgaaaacgcggaatttccagcccgtgtgcaaattctccaagatgccaaaatcagtacggccattgggccgatgtgagtccagggccttctctctgttctacagaaaagagggaaagggggctggagaggcagggtaacgcccgtgggtgcctcggacacccagctctcccaaggctcttaagcgcgcaacagcaagaaccaggacgtcagagtgcttcctgggcctggagcacggtccgagctgcgtcccccgctgcagcctgtcgagggcgccccaggcccaggcagggggcgagggtaatgggctggaggacaccgtggggcctgggaacagggtgcgagtgggttttgctgtgaggcggcccgggccgggtggcagctccaggaggagagagagccccttcctctgcggcgcaggaagccggagggagcgtccaacctgttgaacttgtgtattgacaagttgtcaagctcggcaggccgaagattgccctgaattaatttgtttgtttaaactgttggtggtaattgtcacatctcccctgcctttctccagcatactcggagacgggttctccctcgttccattccctagcaatcccggggctcgggtcctttcctcctgcggccctcggaggccaaaagctatttctgtgggggcggggcctgcgggtagggaggcttgttcttggacggagctggaaaagtctgcgcagaaacgaggtgtctggcgtgcgcgacgctccctctcttttggatgggggcgaggatacctggctactccagcccagagggtctctggtttccctgcgaacccccttccctggtggggaggagccctggaccgaaggagaacacacctggtcttacttgaggctctgccattatcgtggcactttgagcacgggcccctcttctaagcctcagcttccgaatctattcagtgtagtggttagacgatctcagaatcccttcctccctcagattccctctcccttcttcttttcacctcttgggcgattttgcccgcccagacttgacattggggcggggctggggggagagccgcagcggctgtgtctcgacgtctctaatcgccggcatgcgtttctctgtttgcctctgcagccgtgcagcacgagcgggggcctcggacgtccaccatccgcaagcaagtggccctctacttccgtggacacaaggaggagaacggggccgccgcgcactttccctcggcggcgctccctgcgccggccttcttcaccgcggtcacgcagctggagccgcacggcctggagctggccgcggtgtccaccactccagagcggcagaccctcgtgagcctggctcagcccacgcccaaggtcagcggccttgctgggcccaaagagactcgtgccagcgaatggagagggacgcacccagttcttctgagctgtgtgattggggtcaggcaaactggggagagaactccagggtgcttggcgggtctctgcatggagctccagcccttctgctctcccttgttcagccaggggtgctcaaacttgagtgtacagtagagtcaacctccgagtggctacaagtgtgcactccggatcttatccccccagaaatttcatttcagcaagtttggggtggaggccaggaacctgcacctttaggaaacacccactggtaatgggtggtgggtggagacctcgtctaaacccagagggcagcctcaggtgttcctaaagaccagaagaaccaacgttcatttttagaggagaggaattggctacagctggaggaagggctccagaattccaaatcttggcatgtatgatcttgggcaaagccatgagtttctaacgcaagtgcgaaatgtggagatcacactgttagaacagtttgaggaatctgagttcatttcccatgctcccctcacctacttctgaggcaggtggatttacagcagggttgattccataggagcagggccacagcctgaaccacctggaaaggctgccacctaaggcctaccctccaggcctacagctgatacctactaacacccccactccaggctgatgagggcctaggatctccctcagaggagggccagctgcagccccacactgcagggaagccagacacctgggcacatgcacacgcacaatatttaatatggctttcttacccttgatgtgtataataagctctggaaagtagtgttatgaatatgttgtcagttatgaatgggaatgctctgtgaatgattaagatgtctaattgaaatatttccataatatactaatcctttctaaaaatactcatatgcatatttgtgtttgggatgcctattaatttatactttttcacatctatttttatttacacaaatgcaagcagctcttgtctaaattgggagccaggcttggcacttggctcagcccaaggaaaatttgctgcaggggatagaaaagccagagggccttctggaagggagaggctcccaaagagtggaaatggacctcccccaaccagtattacttttcaaactctatagacagcgatgtttgatttttttacccaccaatgtcaactgcatgtttaaacaaaacatccaaattcttttttatccccttccttgctttaattagaaattaaaagtttggttcttcttgcaaagctgtggtttcctcacttccaggtgtctttctttcttccctacccagtacccccatgaagtgaatgggaccccaatgtatctctatgaagtggccacggagtcggtgtgtgaatcagctgccagacttctcttcatgagcatcaagtgggctaagagtgtgccagccttctccacgctgtctttgcaagaccaggtatgaccacactgaggccttgggagaaagagagctgggaaagaagcagtagcactcagccttataaaacttcctctatccctgggtaaaccacccaaggcaggcatccattcttaatagcagtgaggaaactacttgtttttacttgcttcttcctgtgggttcaaaatatctacctatatgatccttagtaagaaacgtaattacattatttcagaaaggatgggtccagtctgtgaaaacacacatacaagaacattacctctttttgtttgattggaacagcaaatataatctcaaattttaaaattgtaatgattttctaaaactgttgatgaaacaatgttttactaagaacattggaactgagagaagtagaaggtggtaagagtatgccctcatgagatttttcagaactgatgttattattttatattcccagctttatattctccattgcgatgctcccagttttggtcattaattgataagcatgtaaaaccaaagggcacagtgcacacctcctgtaggctaggttcttccttgattcttcatgtacttttagacattttgtaaacaaataggcattttgcttaattccgtggttgtaaatgacattcaggggaagaaaaagtgtgtgcagtgaaacattgtattgtactgagacccagaaattttgttgataggaatattagaaatgctaacatttttctaaccttaaaggaaagaaagaaaataaagtgttcccaaccattggctgttaccagtgcattcacaggaattaatgacaaattttccaaaggctaataagtagttctaaaagcaaaggatttatttcttcaattcatttcatacctaattaaagcataatagtgcccctttatatgaagtatgtttcctacggaaagatcgggcaatgtgctaaaagcatttcattttctagcatgagatgttcttgttttcatggcctgccctttcaaatatggccagaattaaatattgtttaccttgcattttataattatttcctgtacttgatggaataaaactaaaaataaaacattaaaaaaattaaaccctttggtctaattgtgattttggttacaagccttcatgattcagctcttagctcccaaaagaaatccttttacataaatcatttagagttgactggcttttgagttttgagatttttaaaggtagttaggtcctatctttgaccaggtttactggttagctctaaccacttcctgtgtgtgtgtgtgtgtgtgtgtgtgtgtgtgtgtgtgtgtagactggctattttttttcaaaataagtatttgtatactctcacccaaacaaaatttacttactgtctgccacttagccctttggtagaaatccttcgacaacaagcaacctgcagtgaagtggaatctggtatattaatttggaaaaagagacagattttcattttaaatattcagtagcacattttattagaataaaaatgacaagcaccttgatgctgtccatttatgggtctcagaaaaatcaagcagtgagacgaggaaaactcagcaaaacccgattaacataattacaccctgatttcccccagtgcctcttgggaattagtgatctctgtctctctcccagcccagccccctcaaccctccaggaagatggggacccagctctgcaagcgtctgaggaatcctcaaccctgctaatagcagcattctctgtgaggggaatccacctgctgagctgctggcatttcataaagcctcgctctctagaggagcttctaggtggtcaggaatgggtggatacaaggacaagaggggcaaatccttttctgagagaaggaaactttggagaattggaatggctgactctcaaatccatatgcatatctataggcaccttttcaaaaggaaaatatgggaaaataagggaaagctagaatattcagaaaaaattaccaagacaggcatttaaaacactttttaaaataatggaaatttacatagtgaaattgtttataaatttataaattacacactatattatattatacatctattgtatgacagctgatgcttttggaagatgcttggagagaactgtttgttctaggaatagcacaatgggccattccggttgatgctaacactctactggctgtatctggtaagaattgcacaatttaatgactttgttgtagaaattaccataaaaatacattactgaaaaaagaacaacatgtaaagaataacaaattcctgctgaacaatagagtatacctgtcatttataaatctatatttaaatgcaaataatgttgttttgttgtattcatgactgcttgcattgttatttaaatgcaaattactgtgtttgttatcatccaagagaagattttatattaactttcatacaatatagccggtttacatggaatcagatatcttagagtgacaattgaatagatattgatatgcaggattttgtcaaaaatcaatattaaatcatgaaaatgccttcatattagagtatttatcccatatttttattctaggcatgaacggtgacaacacagattcccagaagctgaacaagatcatatctgaaatacaggctttacaagaggtggtggctcgatttagacaactccggttagatgctactgaatttgcctgtctaaaatgcatcgtcactttcaaagccggtaagcagacacagacccctgtttcttctccttccccagttttgccacctcactaattcagccacctcgaagtctgaactgacctttgcaaaaagaggtgatggttttcaagggagctgatactcttaatctggccccattttttattgctatgggaacctgcatgttctgctgggcatcaacttccagagaggtgcattcccagacccaatttctttttttctttctttttttttattttttaaatttttgtggagatggtgtcttgctcttgtcacccaggctggagtccaatggcaccatctcagctcactgcaacctctgcctcctgggtttaagcaattctcctgcctcagcctcccaagtagctgggattacagacacatgccaccatgcctggctaatttttgtatttttagtagaaacagggtttcaccatgttggccaggttggtctcgaactgctgacctcaagtgatccgcctgcctcggcctcccaaagtgctgggattacaggcgtgagcactgcgctcggctcccagatgcaatttctatgctgtctatcacagtttcctggtcttcatttctagttcctacacatagtggttctgaactgagaagtttccggaatgctgccgccattgcagcccttcaagatgaggctcagctaacgctcaacagctacatccataccaggtgacccttgtttgccttgaacatgtacttaagaaaattgcctccattgtgaatgcctgagcaggcggtaataagccagttcaaacattgtgactaattatcttgttgccagccagttaatttagggagaatccatgtccttacctatctctcagggtgggtgagaggagcaaatctaattagatgatcaaagtgaaagcactgccagacatattacagttgtcctggcggaacaaattgatccatcaaaataatggaacaacatttgtgtgaatgggtatggaggggtcaaaaatgaagcctaggctgggcacagtggctcacgcctgtaatcccagcactttgggaggccgaggtgggtggatcacgaggtcagaagatcgagaccatcctggctaacacagtgaaaccccgtctctactaaataatacaaaaaaattagctgggtgtggtggtgggcacctgtagtcccagcagctactcggaaggctgaggcaggagaatgtcgtgaacctgggaggtggaacttgcagtgagccgatattgtgccactgcactccagcctgggcgacagagcgagactccgtctcaaaaaaaaaaaaaaaaaaaaagaagctcaaagtgtaatggttggtatgtgagagagtggccacatcatccttgagaaaacacaggtgactttcttcagatgccaatctcaaataaaaggatgagagaactttccagagaggctatctttttttttgagacagggtcttgctctgttgcccaggctggaaggctgaagtgcagtggcatgtgagcatggctcactgcagccttgaactcatgggctcatgtgatcctcccacctcagcctattgagtagctgagactataggtgcatgccaccacacccagctaatttttttttttttttttttttgagacagagtttcactctttcacccaggctggagtgtagcggtgcaatctcggctcactgcaaccttcgccttccgggttcaagtgattctcctgcctcagcctcccaagtagctgggattacaggtgcctgccaccacgcccagctaatttttgtattttcagtagagacggggtttcaccgtgttggccaggcaggtctcgaactcctgaacttgtgatctgcctgccttgacctcccaaagtgctgggattacaggtgtgagccaccatgcccggcacacccagctaatttttaaactttttatagagacaaggtcttgctatgttgcccaggctggtctcgaactcctggcctcaagtgatcctcccacctaagtctcccaaagtgctgggattacaggcctgggccactgtgcccagcctaaagaagccatcttttcacctatcataactgttgtttggccttggtgactggtatctgttattttgtgtcataacatctaccaggttacttctggccatgcagggcccacaggcagaggctgtttttggctgtttgtaggaactctcagagactggggctccaacaaagctcctcctggcccagcactgggcaagcccattaagaagtatagactgggggctgaggtggctccacacctgtaatcccagcattttgggaggccaaggcaggcagttcacttgagctcaagagttcgagaccagcctgggcacaacatggcaagaccccatctccaccaaaaatttaaaaaaaaaaaaaagaagaagtgtaaattttattatgccatttaaaaaaaaagccaggcttttaaagagaaatggaaactttctagtttcctgagttaggactggtagatttgaagttagaatagagttactcttctctaggctgatttgaaaggaatctgtgaaagctcagctccataatctcaacatcagctatagacactgtggggggaataaatacatcaaatgggtagaggctgttaatgcctccctcaactaatgggtcagagaaatcccaagtcaactctgtccatttggggtgataccacttctgctagagtctctctatttctatcgtaaacctcttttgaatactaaatgaataaaactgttccctgtctatggaatatcactgaaactatgttgacagatagtgcacctgtatatgttttttcaaattaaaatgccaggatttgaattttaaatgcatattgaattacagaatatatatagtaggcagttaatatttgttcaaatttattaaatggagcagtacataatctgggtacttctactgacttgtaggccgggcacagtggctcacacctgtaatcccaagcactttgggagttcaaggagggcggattacctgaggtcaggagttcaacaccagcctggccaacatggtgaaacccgtctctaccaaaaatagaaaagttagctgggcgtcatgacgtgcacctgtagtcccagctactcaggaggctgaggcaggagaactgcttgaagctgggaagtggaggttgcagtgagccgagattgtgccactgcactccagccccaggtaacagagtgagtgagactccgtctaaaaaacaaacaaaaaaattaaaaagacaaaaaaacaaaaacaaactaacttgtatgtcctaactgacctttgacatttagagccattatggtattaagaacttaaaaatgagaaggacgtggtatccagttattgatccagtcaagcctttgccgagtactggccacatgcagggctgcaggtgggcgatatgggataccagaaggagcaagacactgccccttatcattgcaagaagtgggcagcagtgtcactccaatccaaactagagaagagaggaaagcaatgtggggagtgtgacagatgaatcctagtcagagggagtgagggacaatcagaaaagctcaaagtctgatgggtggaggaaagaacatgtgaattggtccttcaatgggaggaggatttcagcaggggagaagatgtgtcctgagagtggtggaggagctggtaggggtcctgtgggaagtgccagagaggtgagtgaggaggggagcctggtgtgccaggagctgctgatagggtggcccgagagaattcaaccatgggttaacaacagcctattttagagaaatggcaagtaaagtacatctccccaacaccgcaaaagaagaaaattatgtgtggaaaaaacacatctgctttgccatggaattcttattatttctattaaatattagaatagtaaatatcaaataagtatcttatttcttattaaataatggaattatggaatttcttatttcatggaattcttatttcattctgatatcagctacagctgtaatttaatatttatatctagggtcatacatgtgacaaaaatgactatgccttatttcttagcccttcaaatcagtgaacactttttcctccagcactttcctgtctagaaaaataaaacctgaacttgaaatgaaaacttaacatgcaaactgaaactgagcctaattgtatattacagctctctaagctatttctctaattatcgaggacgtaaggagaaggctaggaattgacattccacacaaactatattctataactgaagatcaaatatgcaaatctgtaatagacctaaaacacttaaacctaaaagaaaatccaattattgatgctaatggatgaagacaagggcatagatattctaaaaaataattttgattagtcagaccttctctctctaacacacacacacacacacgcacacacacatacacacacacacacacacacacattgtttttgttttggatgcccaggctgcattgcagtggtgcaatcatggctcactgcaacctctgcctctgaggctcaagcaattctcccacctctgccttctgagtatctgggactacaggtgcccagcgaatttttgtagagatgagcccttgctatgttgcccaggctcatcttgaactcctgggctcaagcgatgctcttgcctcagcctcccaaagtgctgggattacaggtatgagccaccacacctgacctcatacattgctattgtttctggtagtagtacagtatgctatatgtaatagacaattaatttttgttgactgactaaccaaccctttcccaactaaagaataaaataagtgggagagtagatgagtgggtaatctaatcgcagaaaatcaggagttggttgtctatagattcccccaaattcatcctttctgaaggtgattatttctcacagtggtttctcaccacgggaaatgttcagcatgttgggtggatgctgcagatggcagaggtcgtccaggcagccactgcctccgacttgctgaagaattatctctactatgcctggtcctgggaagggaaatagagctgttgaaaagaagtggccaaggtgaaagggagacacggatttggggattactttccaagaaacattagaaatacattaaacaaggagaacaagtggtaggatttaagtatttttttttaatgcaggtaagcttcaccatttccacaccacactactagatgtggtctggtggcccctatctgcaggtggtcatgaagctgggcagtgaaagagccagctgaggtcctgagaggcccagatgaactataagccttgtattctgtggaagtgaaggactcttatgtgcccagagctaaatatttagacaagcatgaaagttgctcccctgaactttatttgcagggtggagttatcaggcagttaaacacagccacctgactccttcgaaggaattttgatatcccttagcttctagcaccttgtggcctgggttgaacccagcttagtcacagatgtgtatcccggaagttcaggttttaggtgtttcatttcagtggagggagctctccttatgtatattgatatctaattctaactattggctgaagaagtatcagggctgcagtgaggaggtggcttgcaggcatctaaaggcagcagaagattgaacttgcacatctgagcacagatatatgttggacatcaaaagaggaaattgttaagcaatttctcacatctttaattacatgccaatttcattgacatgagagttgggtggcactgccacccaacagaacttagtctttaatttgcagtgtaataaggatggaattattcctgagagagactaagtataatgcctgaataataatttggagaattgcttagaaaaagaagccattttatttgagggaaatagccttgaggagtccttagaattagaaaacatgggttctgttgctagccttatcctcaatgccctggtcgttttctataatggaaaccttaaatttattatttggcttaaaattagtattatgcttcttaaatttctttttttttcccaaacaaaatgcaatccatttgttaatgtagagagggtgtccgtgtgattttggcagcatcatttatggtctccctgcctcaagtagtctacctgcaaaacggggacaacagtgcctgtccagaactttgctgcagggatactgtgttattcaagagacctagatcagcaatgctggagatgatgtgtgttcaagtgtaagacgttagtttccataagtaatggcctctgaccttgttttcatggcttctcacattccagatatcccactcaaccctgtcgctttggaaaactcctgttgcttttgccagctttacgttctattagcccatcaactatagaagaagtgtttttcaaaaaaaccatcggcaatgtgccaattacaagactgctttcagatatgtacaaatccagtgatatctaagctcacaagatacccacttttcaggatgggacagtatcagatgaacttcaacccatggagaacaagcctcaactaacaaacccttcaggaagcatataccggggaatgtgtagccttcaggaaaaaaatgccaattgacacaaagcattccagtagctatgacctgccgccctgaccaggatagggcgggtgggaaggagaggggtgcaacaggaccgcctgcactgaaaactcactgctgccatgccctgggagggggcaaactgggggttgccacaggccgtgccattctgcctcttacctggaagatcaggctgaacgatcaaaagctgaaacataagtagtgctttctcttcctttttagcatacaaagtttggtaaccaaatatagctctgtgtataacatcgtactgcggccttcaaaactacgttatgttggagcatttattttaaaaataatggtaggttttaaattaaaagtgttatcaaaagtttcccctctattgtaatacattattaagtggccttcagaactgagttaataagtgaaaagtagcttatgccatgtgatttgctttttctctatcttcttttttcttttctttctctttcttttgttctttcttcttcttttttaataccataggccaggcaaccttgtcaaaggaattgatggacaaaatgagattctcaccaggacttcaggttggataacatgtcaaaaagagaagagctttactaaaagaacataagtcaagggaggatgaataaaaacagcaaaaccaaataaagtggagatgagtgattgagtgaggtagattgctgtcccgttaacatagtgctgaaaccaaaggcagtgggggtccaaactcgtggtgcagcaagtcacaccagacaggaaacgaatatggacgtaattgcagaaggaacttcaaggagatgaatgaatgctaaaagggttcttgactgatccattgctaacagcctgagactcttcaatgcctttccgaaaactggtttctagtaaagccttgaatgaacacacacacacacacacacacacacacacacacacacacacacacacaccgtcctacactttaagctgctcctttggtatgactctatacttatggaaatgtagaaacaaacatttttaaatagctgctgtacttttcacattttgatttattaggtactagcactgaggaaaaaaaattcagcacttggactatcataggatgagtaaaacttttcttgtacaaagtgaattaactgatttgtgaagttaaaaggttgtactcattgtatttacaaagaataaaaatatattgaatttaaatgaa

SEQ ID NO: 452 - DNA, 76232 bp, Homo sapiens
  source 1..76232: mol_type = genomic DNA; note = NC_000006.12:c10838954-10762723 MAK [organism=Homo sapiens] [GeneID=4117] [chromosome=6]
aggaattgaccaatttaaggaactgcatacaagaacagtttttccccaggcacaagtaaacaagtgcaagtatgaggcaaacagacttccttctcttgctctgcccggtctgggaaccatattttaattaatcaagactttgtagaatgaatcggaacaaaaccaaaacaaaataaagggcaaacaaaccaacttctgacaaagacctgactgaaaaggtaatcaactcccctaaaccccaagtctaaatggcacacttgctgcagctcagccgacagtcccccggctccatgaagccccgccccggggaaggcggggcctgcgggaattggcggggatttcccgcgaggccacgccctctctgggccggccgtaggcccgcctgctgcccccgccgtttcctaggagatgaaacacacaagacgccggagcttcacaagggagcgaacgaggtaagcagcaggcgcggacaggtaatccccagcgggctgcagggccaccaccctctgtccgacccagccggagcccgacctgcgaggctggccgggcatgtcccctcggcgccctgtgctaccagggccaatctccgcccggagaccggtccctgacgccggtaggggaaggactggagggaggagggtccccggaggggcggagcgggcgggagtggtcagcccgagggaaggcggtcggtgtctcccagacctcttgaccactttcccgcctcctggaccgcgggggccggcctggcgtgggaggatgacggccgggcgtcccttagcctgagacccccgcccctaaactctcctccgggatctcccacctctgctcccctgctgcttgggctggcggtggaaactgtttttaggacagagaggcaggattgggtctcagggaggcagcggaactgagttcagaactgttgcaaaatctaaaaggagggagaaaaacaggaattaggtccgactccagccctcgctggtgcatcccaaaggacgctcaggtgaaagtggaattccgcacacccccgtcccccccaacggcgccggactcccggcgcccggggacgccccctccttccaccacgcggtccctggagccttttaagagccctggtttgcagagtcggatcagaaagtgtgtgacgaaaactgtcccttttctgcaagtaatccgttttaatttagggacaggtcgagagtgcggtgtcgagagcaataaaactggtttttagtggttagtaatctcaatcctacaaggaaagagctgtatgcaaatgtggttagataatcgtttaaaagaaacagacatttgttctaatgataacggaattctcaaagagggaagccaaagttatctgactttatttattcagaaacacaacccattaagtgaaataatggtgaaaacaaaagtgactttccagcttttcgatcgggccccgcctccccggcccttcaattcccgaggcttgaccgggagggagaaagttcccccaaccgcgccaccgcctgcttccactgcaggcaccgggcaggacgtttaatctcttcgtcggggtggactttttttgtgtataagctttgaaataatttgtgaatatgagcacagagaactgtgcttttatattttaagatacagtctttgttttcccattgtaatagctcatttaatttctgtaaaacttcgacttggttagtttgggatctttttttcctgcgttgctttttaaagagtttggtgacttttaaaacgttaattactcttttgttgtgtattagaagcgttaagccagcctcggagtgacataatatgttctagaaagccacgttgaagacatccaagccttatctcttcagtttttggcagacgcttgttttacccttcatttgccctctttgctaatcttctttaatcctatctgaatctcttattagctggcaaaagctgttgagagtaaaggctatatttacaacaattgtgcacttagagaaacggtaattatgaacttagattaaaaagttgaaaactagaatgagagataaattataagggtatttatttttgtgtaggtctataattaagcctctaaataagcatctttttctttaacccataggaaggtcaataaatgttatagcttgattgtagaaaattccaagtttttaacaattctgttaaattgaggatgatagttatatttacttgggttttttgttgcatatgtatcatatctatatatattcatgtacataagaaactgtgttaatatattcctattttgtagattagttttccataggtcaacagagaagaatatatgtaacttgtagagaaatattattgtgcgtgaactggagaaccatgggaagcctgtgtttaaggaacatagactgctttttgattagtaatcagtagttgctatgccacattgataaaagtagttgcttatgtgctatcagggagcagggacatggaataatgattttttaaaagctttaccttgatgtctatgtctctacattagacaattgtatgttcaggggatagaaggaacagttgcaatgatcagcgtctcaccctgggcagctgttgattttgtaattaatgtagttcaaaagaagcctttccaaagttttttcttagggagcgcagtatgtaaagttgttttacttaaaggttaggtagggcttaaatgggacagatcctcacagaaccactaatctgaccttttaaaaatctatgtcacgtccgtaatcctcaacactccacccctcaaacagaaaggagctgggaaatggtcgtgttccttgcttattcttccctcaatataagtacaccctatcctatagccatcatccgttgaaagacaattggtgttgccggtgtttattcagaagttgattggttaggcttggaatgaagttgccaaaatagccactcgcaaagagactgtgcacgcaggcttgggtcgaaagtcatcagtgactgaatgctctattgtgctgatagtgctggtgcagcttcaggtcaccctcccaccccagggcggtggtgatgggggtggctgatggccttaatagtggaagagagaggtgtaattaattcttaatttttagattgttgggccaatgaaggtgatttttttgtcactctttgtgtttccacttcctgaataacactcgctaccatcattaccatgcaaccagaggcagctccctcttccattcccttctcaagtcatatgtcctttttcagaattgtctgcattacttttctaccttttagaccctcaaatgcttgtccttggttaggtgttaacatgaaaataatttggttaaaagaaaagatgatgctatcataccattatgtttctgaattaaataattttcatggctgggcgcagtggctcacgcctataaaccccagcactttgggaggccgaggcaggtggatcacatgaggtcaggagttcaagaccagcctggccaacgtggtaaaaccctgtctctactaaaaatacagaaattagccgggcatggtggcacgcgcctgtaatcccagctactcaggaggctgaggcaggagagtcccttgaacctgggaggcggaggttgcagtgagcagagataacgccaccacactccagcctgggcatccgagctgtaggagattggtcagggtggtgggaaaaatcgtagaaagatgcaaaccttcttggaaggccaggggtttgcaaagcttcaaaagaaaatttggctgaaggcagctgaattctcttaagagcttaggttagataacaaggggatgtaaagaaactaatctagataagttagtttacttaggcctcagaacctggcctttaatcatccagacgcaggactgcgtggggcgggggagcggtgcgaccatgttaattacccacaagtgtgttaactcaaagcctttgtcattaaatctgtgctgaataaatgcccacagcgccagctgagcagggccacggtttacagcaccctcctggggtctgtgtgctgcccggtcccctagcccgctctttcactggatacctgtgtctgagtgcattctttgatctgtcattcagccagggtctgcgggtcggacctggcacagagtgagactctgtctcaaacaataataataataataataataattttcatgagaggagcaccacctagattctttctcccttaaccattcaagttctaaggtctcactctttcccttcactgtttctgttatttttcactggtctgaatgacccagatgtagcattagggtttagtcaggatatggagtagtcccacttcactttccaggtagtcagcaatatcttagtgtttgagtgaagagctgcattaggaatcttaaggtggaggttggggtaggtggcttgagttgtggagcttagtctgtgtggttttggagcaaagaggatgatttctttagcctcattagggatagtaagagctggcaccagttcataagaatggcttgtttagaagttggagacgaccctgaaaaaccaacaacatcaagccaaatgcaactattggattgactccatcgttgattctctagttgatcctagacaggtcatttaatccttccatgtttttattttatgatcttactgtcataaggaacatgatggccttttgtgcaaatatattctctttatgcttacttaatcagaaagaatcagtaaacctagagatcacatatttcctaaaagagatagatatatgtcaccttaaataggctagctagaaaagagtgtacagcaattgaatatgctggtgataaattgcaaaatactgatttaataaaatcctaaatgagaagaaatatattttagtccatgttttgtttaacgtagtacaaaacaaaacaacccaaaagatttttccaaattatatttgcttatacagataaaggcaaaatgaagaaaagcaaattcatgttttgattaggaaccgtgcagagagagagactgcctttctctatattaacaccttaatatttggaatcagtgtctatgaataaggtgacaatgacttacaaaactattctttttcaggcaaatggggaaccatttgctggtacttatgattattagctcgggcttaatctgacaaaaaggaagaaacccctaaatagagatggaatctgctgtcatgttctctttttcaagatcctggccatggagttagctagcctaaattattttatatgtgcctttgaagggattgttacctacatgaagtaagataaatgttaaatacgtactccctattattattattattattattattattattattttgagacagagtctcgcactgttgcccaggtgggagtgcagtggtgcaatcttggctcactgcaacctccgcctcccaggttcaagtgattctcctacctcagcctccttagtaactagggctacaggcctgcgccaccacacccagctaatttctgtatttttagtagagatgaagtttcaccacgttggtcaggctggtctcaaacacctgacctcaggtgatccacccgtcttggcctcccaaagcgttgggattacagggatgagccagggcgcccagcccacactccgtattattaaaagccccacaggattcttctcaagttttctgtgaacagatacgttcctgtaaataggaaacaacataactttactgtgctgctctgcacgtttatgtctgctcatgtttatgtttcttttcccggaaaggctgttttgggaaatcttaagtattttgacaactataacgtgcccttgttggtcttaaattcctgcaaataatagaggagcaatttctatgatttaaatgaaagtgctccagtgagagaaaaatattctttgaatgaagaactaagtcataaaaggtactttaaaacaaactacatacacacctcggagatactgtgggtttagctccagaccacggcaataaagtgaatattgcaataaagcaagtcacacatgtttttgggtttaaagtacatatgcaaattatgtttacattatactgtagtctatttagtatacaatagcattttgtctagaaaaaataacatacataccttaatttaaaaatatcttattgtggccgggagcagtagctcacacctgtaatcccaacacatcgggaggtggaggcaggtggatcacttgaggtcaggagtttgagaccagcctgtccaacgtggtgaaaccctgtttctactaaaattacaaaaaatagctgggtgtagtagcttgcgcctatagtcccagctacatgggaggctgtcaaaaaaaaaaatcttattgctaaaaaatgctgattatctgagccttcagtgagtcatagtctttttgctggtggagggctttgcctctgtgttgatggctgctgaccgatcagggtggtggctgctgaaggttgagatggctgtaaccatttctcaaaatgagacaacaatggtatttgctacattgacagacttttcataaaagatttctctgtaatatgtgagactgtttgatagcattttacttacagtagaacttctttcaaaattgaagtcagtcttctcacatcctgccactgctttgtcaactcagtttatgtaatattctaaatcctttgttcttgactgggcactggttcatgcctgtaatcccgccgaggcgggcggatcgctgaggccaggagttcgagaccagcttggccaacatggtgaaaccccatctctactaaaaatacaaaaattagccaggtgtggtggtgcgcacctgtaatcccagctactgggggtcggggtgggcacctgtaatcccagctactgggggagtgatggtgacaggggtgaggactcagggacaaaaatcacttgaacctgggaggcggaggttacagtgagccaagattgtgccactgcactccaaccagagtctcactctgtctcaaaaaaagaaaaaaattcttttttgtcttttcagcagtgttaatagcatctctaccagaagtagattccatctcaataaaacagtttctttgttcatccataagaaacacttcctcattcattcaagtttgattatgaggttacaacatttcagtcacatcttcaggctctacttccctttttatttattaaaaaatttttttttctttagagacagagtcttactctgtcacccaggatggagtttagtggtgtgatcatagctcactgtaaccttgaactcctgggctcaagcaatcctcgtgcctcagcctcccaagtagctgggactacaagcgtgccatcaagtccagctagttttttagtttttgtaaagaagggcatgatatggtgcccaggctggtcttgaactcctggcctctacaatcctcctgccttggcctctcaaatcactgggattacaggcatcagccaccacgcccggctatgtttcttatttctttgtatgaacctagtgtgacactaaatcctaattagtatttacatttttcttagtttgatgtaaaataaagtagcatgttatttaaatagaatatgaaattttaaaataatgctattcctttcatatgaaacaaaagtttgctttatacttaccttacccaattggggtacttatattccacagaaaatttacaagtagtacagttttaaacaatatgccaaattaaatatgatacaaaaattgattcaaagaatggatatcatatagacatcaattttccaaggtctgatttggaataatgtagattatatttagtaaaaaaggaatcatacaagccattatgccattattgaacataaatagcacagtaccatgtaaatgaggcatttaccaagtgagtattaccagtgagttatatgtgaacttcattttacatagacaaatgacttactgacaaatatttaacacaatagtatttatattatttataattttccctttgctctaagttgccagtacaatttttgaagagacttgttaatgaaaattcatgatatccttgttttctttctttagggtgtttataagaatggaagtgttgtttccttgcccgattccttcatgctatatctcatgaacctctgtaatcttgggggagagactatatttaatgatgacaaacctgtcaccagtgtagcaacaacagtgtgaggacaaaagcaaataaaaattaagaagcgttcaaatttatattcaacaaggaagtcatttcaatcaacaacttctgctgcattatttttccaagatgaaccgatacacaaccatgagacagttgggggacggcacgtatgggagtgtgcttatgggcaagagtaatgaatccggggagctggtggccatcaaaaggtactgtgtgtgacactgccaacttcacctttgaaaactctgctctttattttcctgtcctcgcttaagaatatataccagcacaggccagcgcggtggctcatgcctgtaatcccagcactttgggaggccgaggcgggcggatcatgaggttaggagtttgagaccagcctggccaacatggtgaaaccctgtctctactaaaaatacaaaacttagccaggcatggtggcacgcgcctgtaatcccagctactcaggaggccgaggcaggagaattgcttgaacccaggaggtggaagttgcagtgagctgagatcgcgccaccgcactccagcctgggtgatacagtgagactccgtctaaaaatatatatatatacgtgcacacgcacacacacacacacacacacacacacacacacgtgcacacaggctgtgtgcggtggctcatgcctgcaatcccagcactttgggttgaggtcaggagtttgagaccagcttggccaacatggtgaaaccctgtctctactaaaaatacaaaaattagccaggcatggtggtgcacacatgtaatcccagctactcaggaggctgaggcacgagaatcgcttcaacctgggaggcagaggttgcagtgagctgagattgcaccactgcactccagcctgggtgacagaaggagactccatctcaaaaaaaaaaagaatatatacgagcacagaaagaggtctagtttagatcaaatagcatctggctcatgtggaatgtcattcttggaaaagaacattgccaaagaggaattctgctgtttttcttctatattactttaactgtctggcttgtccagctacactgataaaccaaaaaatatgagtgcctccttttttatatgtataatacatttggaccaaaactacaggtgatctttggaatgttcttccaaatttatttgttggttttcgtttttgtttgtgttttttgagatgggggtctcactctgttgcccaggctggcgtgcagtggtgtgatcatggctcactgcagtcctgacttcccaggctcaagcaagctacccaccttggcctcccaaagtgctggaattacaggtgtgagccaccattcctgacctgtttttcacatttaaagttgagtgcagagtagggcttattatttctttaaaacaaggtctcaaaatcagatggtattcataatgtcaaattgagttctgaatgatatatgttatattcctgaacttatgaaatagaattgttgttaatttgtttgtttttaatccactgtgtttatctattgctgcataacaaaatacctgcaaagcttagtgatttaaaataagaagaaacatttattaattcacatagtttctgtgggtcaggaatttagaagtagcttagctgggtagttctggcttgggttctctgatggcagtcagataattggccgaagtttcagtcatccgaaggcttgactgggactgcaggatctacttccaaggtggctcactcttggtttgctagggctgctgtaacaaagtatcacagactggttggcttaaacaacagagatttatttcctcacagttctggaggcaagaagtgcaacatcaaggtatctgctggttgtttcttctgaggcctctctccttggcttgtagacagccatatcctctctaggtctttatatgatcttctcgttgtgcatgtctgtgtccacatttcccccctcttttttttcaagacagggttccattctgtcgcccaggctgaggtacggtggtacaaacatagctcactatagcctcagcctcctgggcttgaaccatcctcctgcctcagcctccagagtagttgggactgtaggcgtgtaccacaacatgtggctaatttttaaaaaatttttttggagtgatggggtcttgccatgttgcccaggctcctcttataaggacaccagtcatatcagatttgggcctacctgaaagacctcacttaaacttaattacctttttaaagaccctatcttcagatactgtcacaccgtgaaagtctgggggctaggacttcaatataggagttttgggggacacagttgaacccatcacactcactcacagggttggcatatttgtactggctgttggcaagaggcacctcaattcccttttacagaggctccttccttgggcctttccagagggttgtttgaatagcctcgggacatggcagttgacttccaccagaaccagtcccgtactcatgggatacgcatctccacattaccacatcaaccaaattatgacaaactaaaatttaaatactttagcaaatgttttaaaatattatgatctaaaccattacatgtacaaggaaataacttcataaaatatttttaaatagtcattatcatcagataagtaaatatataatatacaataatggaaatgaaaaataaattgaataggcttaataaaattcagtgctcatttgtgatttgatgaactaaaaaaaacaaacattgatttcttaaaaaacttatgataaagcctcttggctgaatgcagtggctcacacctataatcccagcactttgggagggcaaggcaggaggatcgcttgatcccaggagtttgagaccagcttggcaacatggtgaaaccccacctctacagaaaatacaaaaattaattgggcatcgtggtgctcacctatagtcccagccactcgggaggctgaggtgggaggattgcttgagcccaggaggtcgaggctgcagtgagccaagatagtgccaccactactgtacttcagcttaggtgacctagtgagaccctatctaaaaacaaaaacaaaagtaaaacaaaacaaaaacttagcaaataggaataaaaagaaacttccctaacctacataattcatattaatgtgaattagtacgaaaacctatataattcatattaatgtgaaatatcagaagtaatatcagtacaaattgtttgaaaaccccaaatgcctgctagcagtcctgctgattaggattgcattggggatacttactactgctataagacagaaacctaagaaatgagtgttattagacaaaatgagctgaaatagcccacatttgtagattaaatgattatgtaaattcacacaaagaaatactttattatatacaaatacatccatatacaaaaatatttttaaaggcctggaaagatacacccaaaatccatgatagccatgggttctggggaggagggtaggcgaatcagaaggggtgttgggtcttgggtacagtcccacagatggttattactgtctggttttatatgacaaaatgtccatcatttttttctgagtggcaaaaatatggtatttgttttatccttcaaaaatatggtatttgttttgttttgttttgagatggattcttgctctgttgccaggctggagtgcagtggcgcgatctcagctcaccacaacctctgcctcctgggttcaagcgattcttctgcttcagcctcccgagtagctgggattacaggcatgtaccaccacgcctggctaattttgcatttttagtagagacggggtttctccatgttggtcaggctggtctcgaactcccgacctcaggtgatccaccagtctcagcctcccaaagtgctgggattacaggcgtgagccaccgtgcccggcctactgtactcttttaattgggaaagcaaaagctttctcacatcccatccagaatgcatagggtttcttctcgttgatcagaagtgtaccacatggcacccctagctgcagggaggctgggaaactgattacttagctgagcattttatattcctgtgtaaaagctgactctgtgaatgaagaggtagagaaggagggctttcagctactcagcttaccgtgtgtctgccacatgcagtatctactgtgtgttgggcagtgctccaccttaggcaaagatggagcaaaaatgaatgagaagaggagtcccatggaagacttgaagaaaattgaaaaattcatttagcacaaaattgttaaactcctgttgtatttcatgatcgggacaaaatagatgtcttacaatatactcaggaagaccaacagattcaagaagttacaacatcaagtatgctaagtcctatgatgggggaatattgggtcctgtgggagcctagataagccacactggagaagtatcacaaaagtcttcccaagtcattgagacctcaagaatgagagaaaattatttttttaaaagggggggtggggggaaatgctccagggagtaagaaatagtacgtatgaagccctggaggcgagagagagtgtgtgagggcctaactggggctgagtaactgaaagaagtgtaggtggctggagcgtggattacgagtggggcagaggagggacgtgaggctagcaggtgaagtcgtgaagccagatgaaggagcgtgtatatcttgaagactagaaggtcatgaaggattttcagcagaattgttgatgtgatcaaatttttggaactggctgattagcagaagagtggagacgattgaagaggtcaagactggacaccaggtggccagttagaaggtcaatacagtcatcttggttagaggttagaaggtcagtgcagtcatgttggttagaagtggtggtggcctgacaggaaaatagctttggggatggatgtaagtggatacagtcaagggacatgtaggaagcaggctctatagaaactggtgactgggcatgagggtggagggaggagtaaaaaatggggaagagtccaggctaactcctgggattctggcttaaatgtatagtggtggtgccatgtaccatgtaccatgtcaaggaggggaaaatcacaggcttaggggtaaagctgaattcagtctggggcatgatgacttttagtcaattgaatatttgcatttaaatctcaaaacagaggtgcaggctaatgatttggaatggttagtctacagatggcaattgaaactctttagagggagaagaaaagaggtcctcatttagggcaccgagaaaccatggcatataaaggatgggccctggaataggatcttacaaaaaagtctgaggagccaccagagaaatagggtagaaaccaggagaatgtagaaaatatctgaaaccaagggaaagatctaaagaagcagaagcacgtatcaagaagtctggagtgtgatgattccagagctctttcaatggctcaacattgtacccaagaaattcagatgttttctatgattttcatgctgagcggttagcattgtttttgtcctcaaatgtgtcacctaatgaccaccttatggctacttcacctccaggcattacgtccatgttcaaggagggaagagggcagaataatacgagcaaactcttctcatcttttatcagctagtgataattcttccccagaagtcctcaaggacatccccttacatcttactggctagtattgggtcacgtggtctctcttccaaaggaggctgagagagtgagtatttactcttccagtctctatattaggaggcagaaggaaaggggctggaaatggccttgtgatatttcaacaatatcatcggctgtggtgttccttgggtttggggaatatgacataactggcggccacggtgagcactgttccagtggaatagtggaagccagactgcagtgggacaaggagtagcgggaagtacggcagtggaggcatggagctttggagagttgtgaaggatgagttactgagttgttaagaaagccacaaaggggttgcccagtgtcaggaagagtccgcctgaaattacatggacgaatgtgaaagtggagccgctgggagcattttcatgactttgctttccacctccacccatctgtatggagaggggagactggaggatgacaaggcaggagaggggagactggaggatgacaaggcaggagcagtggaacggtgggagaaggggatgttcagaacgtgtgtgtgatcttgagagtgtagtgggtgaaaggctgatggtggggccaagctggatgaggaggcaaaccacgccacacaggtggttgtaggaatagccacaagttgaacaagaaagaggttgtataaagaagttttgagggtagcgacggtgaaaaggataggaggttatgatcaagagtctgaagttaggttgttaggtcttggacagtaggaccattcctcataacaaggagtttatggtaactgtggtaagacagaggtgaacatctcttaggagttaagcaactgtgaagccaggctactggcagggttatcagtttaacctacattgaatattcactatagccgttactcctcaagtctgaatgagacagtgattgttatctacaagagtcatacaagcaggctttgccatctctttaaagcccgatatagagggataaactttacctgaaaattacagatattagagtcttcattctcccttctcattttttttttttgtttgttaccaaaacaattcacatcccataatatcctatcaatcttttgcttggtgatataaaattttaggcatttccaatttaggctataaatattctaggtataacttgttagataccgctttaagatccatcgatacttttcccctaaaattaaaaataaattccaggccgggtgtggtggctgatgcctgtaatcccagcactttgggaggccaagtggggtggatcacctgaggtcaggagtttgagaccagcctggccaacaaggtgaaatcccatctctactaaaaatacaaaaattagccgggtgtggtcgtgtgtgcctgtaatcccagcaactcaggaggctgaagcaggagaatcacttgaacccaggaggcggaggttgcagtgagctgagatcacaccactgcattccagcccaggcaacagagtgagactctgtctctaaataaataaataaatacgttctacattgaatacattttgtggagtagctgaagaagagctgcctattcttaattttcagagtgggcagtaaacatgtccccttaaagggaaattgattacctggaaggtgttttcattctaaaaaccttttaaacaaaagagccggtgtcgggggctgggagtgggggtttctattggaattagagaagttcagctatggaatttaacaagttccatgtgttattagatatggaatttaacaagttccatatggaatttaacaagtaggaagtaaacaagttcagaattacgttgagaagcagagaagaagctgaatgctggccctctgcttttgggagttggcctgaagaagcaagggcatggcatggcagttggtagatgatggacagggtggtgtaatctgctaatgtaaacatggagaagaaagtctgtgcttaattcagcaggcaaaccttttgagcggtctagaaatgcagtcaaaactggctaggatgtgttggagggggaatggttagaagttgggagaacactacactgaacaaaataagaggtttctttgaatgtttcctttggggagttttaatttagatcactgaaatcttgtcttttctgcaattttttttaaaaaaagttatttactttatgatagaggatggtagaaagattccctcacttaattaagttaataaatatctattaagccctctgccctttaagaacttgagaggtagttctatttctgaagttgatttcctgtgtcagatgggaacaccatggtaccatctcttatttgttcattgccctggcatggagtggatattgacgaattaataaatgacaaaagatggcaaggaacctaaaaggaaatgccttttcttagctattctaagcaattggtttacctttgggataatcattttgtaaggaaacttctgtatttgttgtaaatagatacatgcattgccttagggaagggaagtactgctgagaagtggtaattgctggaaagaagaagagatgaagagagtacatctggatggatgaagagaatacagattttttttttttttgagacggagttttgctcttgttgctcaggctggagtgcaatggcgcgatctcggctcactgcaacttctgcctcccaggttcaagcgattctcctgcctccgtctcccaagtagctgggattataggcatgcgccaccatgcccagctcatttttgtatttttagtagagacggggtttctccatgttggttagactggtcttgaactcctggccgcaggtgatccacctgcctcagcttctgaaagtgctgcgattacaggtgtgagccaccgcacccggccagcttttttttttttttttttttttgagacggagtctcgctctgttgcccaggctggagtgcagtggtgcgatctcagctcactgcaagctctgcctcccgagttcacgccattctcctgcctcagcctcccaagtagctgggactacaggcgcccgccaccacgcctggctaattttttgtattttcagtagagatggggtttcaccctgttacccaggagggtctccatctcctgacctcgtgatccgcccgccttggcctcccaaagtgctgggattacaggtgtgagccaccgtgcccggcctcagatttttttttttttaagagacaaagtctccctgtgttgcccaggctggagtgcagtggctattcacaggctcggttatagcacactacagcctctaacttttgagctcaagcagtccgcctgcctcagcctccagagtagctgggactacaggcgcacaccagcatgccagtgagagtgcagattttacaggtagaatgaaagtttcagttatcactgaagcttgaaaagtaacttgaacgtatttttatttggcttctaaaagattggatacttttaaaattctagacctggagtggtggctcatgcctgtaatcccagcactttgggaggctgaggtgggcggattacctgaggtcaggaattcgagaccagcctggccaacatggcaaaaccgcatctgtactaaaaatacaaaaattagtcgagcttggtggcacacacctgtcatcccagctacttgggaggctgaggtaggagaatcgcttgaacctgggagacagaggtaacagtgagccgagatcacgccattgcagtccagcctgggtgacagagcgaggctccatctcaaaaatgaaataaaattctgaaattacgtttcaagaatcatagcaggctgggtgtggtggctcatgcctgtaatcccagcactttgagaggccgaggtgggcagattgcttgagcccaggagtttgagactagcatgagcaacatggtgaaaccccatctctacaaaaaatacaagaagttgctgggcgtggtggcatgtacctatagtcccagctacccaggaggcagaggtgggaggatcacctgagcccaggaggtcaaggctacagtgagccatgatcaggccactgcactccagtctgggtgacagaatgagaccatgtctcaaaaaaaataaaataaataaaaagaatcatagcagattatatgtgcagtttcacatggatatgatcattttattaatcaacttttctttcatagctgtatttgaattggcttctgttttattttaaattcatcattgtgctagatttacattttacattttagcaagacattttataaatctatggcactgaaaagtatcttttaataagctagtaaacccccatttcatcacgcttcttcataaatatctagtacctgagtaactgcaaatgaaattctgattcactaaggatattttagaaataatagcagtgatgcccttgaggtcatctcagtgatgtcctttatttcgtcttatagtcaatcatagatattggtaaacatgaaaacatctagtagttattgagtgctgaactaagcagtttgcaagatgcttttcttatgcagtagtttctactgtatggctagctaaggaatttgaggcacagacaggtcattaggtgacttgtccaaagtcatatggtgagtgactgggcaaggatttgaatccaggcagtgcggttccacagcctctgttcttggctgtgatgttgtgctgccaatttttactcatttcctcacctgtgtattatacccccatagagcctctggatcttaaggattattgtaattaataaagacaacgctaagcttcccaaggatcttctggaacatctcgataggagattataatactaaatgaaagcagcatggcatatttggtttttctttttcacagcccagccttataattcccatgcctgaagaaacattttttagaatatgaatcctgttttttttaaatttttttttttgagacagagtctcactctgccacccaggctggagtgcagtggcgcgatctcggctcactgcaagctccacctcccgggttcacgcccttctcctgcctcagccacccaagtagctgggactacaggtgcccgccaccacgcctggctaattttttgtatttttagtagagatgaggtttcactgtgttagcgaggatggtctcgatctcctgacctcatgatccacccgcctccgcctcccaaagtgctgggcttacaggtgtgagccaccgcgcccggccatgaatcctgtttattatcccctgttttgtatggtgactaaaaatctgttcatataaaaacacatgttcatataaaaacaacaactaactggtgtatatagtggaaatagtttttactcttaaatacacttttggtatatttatctctaatagaaaccaacattgggatgaaagaggggaagtaaagaacaaaattcaagaaagccatttctcatctgtcgcccaggctggagtgcagtggcgcaatcttggctcactacaacctctgcctcctgggttcaagtgattctcctgcctcagcctcccaagtagctgggactacaggcgcctgccaccacgcccagctaattgttttgtatttttagtagagacggggtttcaccatgttagccaggatggtcttgaactcctgaccttgtgatccgcccacctcaacctcccaaagtgctgggattacaggcgtgagccaccgttcccggccaagaaagccatttctaacgtttgtagttacttctgaatttttgccaacttaaatcatttaagtagggagacatttaactttatgggcctcttaagttctaaaaagagagaatcttgaaaaggaccctttaagaaaggcacaattaaactgattagagaaatgttaagaactcacccagaaaagaagattaatggtaattttttcacttttgattaaagctgaattttggatgtgacgtaggcctaccaagtagccttgaggtataggaggtgatttccttataaggatgaggacagagaaagatagctcgcccaaagtgaaccagtagtggagtaagaaagccaacagtgtaatgtgtgtctttgaatcctcaatccctgaacactaaactttccctaatttattttaggatgaagagaaagttctattcttgggatgaatgcatgaacttgagagaagttaaggtaaaatcctaaagatgaaaagaacctgagaaggccttaacactacctgaggaccgtagttaagatgattttattctctgtgggaagcattctgaagataattttgtttgtttttcctttatattcctaaattaatttctcatttcttctggttctgatgtcagtggagaacagcgtataattatatcctcacatttgaaaattcactttcacttttaaaagagcatcttaaaatcatattatgcaaagacaacttttttttttttttttttgtgacagagtcttactctgtcacccaggctggagtgcagtggtgtgatctcagctcactgcaacctccacctcctgggttcaagtgattctcctgcttcagcttcccgagtagctgggactacaggtgtgtgtcaccatgcccagctaatttttgtatttttagtagagacaaggtttcaccatgttggccaggctggtctgcaactcctgacctcaggtgatctgcccgcctcagcctcccaaagtgctgggatagcaggcaagagccaccacgctcagccaccaaagacaactttttaaattactacataccatttccttagattttatgcttaaagacttggatacaattttggatacctttgcatggttaagtcagacaaaagttagacctatttataaaccaagggaaaaacgtaacagattgaaatgtttaatagctattgttggcttgatttattgtttgcacttaacgttcattacttaaagcaattatgtagatattaaaatgtaattaattaatgaacccaggagaaatggaaaattacataaggtaattattacacttagcattgatgcaattttgccaaattctgtaagttttttttaagaaattttaaggcatatttgttatttttcagtctctgaagaaacttaatcatgccaatgttattaaattgaaagaagttatcagagaaaatgaccatctttattttatatttgaatatatgaaagaaaacctctatcaattaatgaaagacaggtatgtttttattcatgtttttccctgttattctctccatgagttctttggatccttttgatatgtcatactttatgagagaaagattgattgctccaaaaggtaaatttaaattaaccagttctgttacctttatcaaagggtaacatttaacactgaagaaccagctgtgacatagccagcatttttctgttgtaaatccttgaaagtgaaggccagtatctcatataaatacacatactatctatttatgctttttaaaatacaaatttatgtatagtttattactcaataataaagctggccttgggcattattgagaaaattatcttggttgctctcccaagcatcttgtgaaggttaatgaaagaatggagaaaggaatgaagttgctttcaagaaaggatctaaaaagctcagtcattagaatgcacaagtcagtgataagacttgatgtgttaccaatcccaaggaaattcacaatttttaaatatgtgtgggcagaatctgtaaagggagagctttggtcttccgccctgggcttggggagataatgttttggtggtggttctggtcatgtctgggagattaacatccattttgcctgcttttaaagtgagaaatgttcaacaacaaactctgaaatacttagaaataattttccgaagtaatgatgttgatttctctttgattcttacacacacacacacacacacacactctcgctcaaggtctgaggatgttacttgaattattctttaatcatatttttccctttctcaaaacatatttattgaatgcctcttatgttccaggccgaaatcatcataacattaatgtcaattaaaataaaagtaaatttctgcccctcaaatcagtttttactttttcagagtcccttctaggccttctatatagacatgcacgcctttttacttagttgtaattttagtgggacaaagttttttatttgattaatttacttacaagtattttttatgtggatacttagtctttatagttataaataatatattctgttaaatggctatactaagcttcactttttgaactatttaaaataaataattagtgtgaaaataggttggtaattattgtatataatattgatggaattattaccattaaaggtgataattataagggttatgaaaacgcttgtaagtgaaaaaacaaaccaaattgtgtgtatgtgactttcattcctaatataaaagttatgtatgcagatggattaggactggattagaatactgaaaaattaaaagtttcttaatcaggtggtgggattatgggtaatcttaattttcagcctctaataaattttgtcctttaaaatattgaaatgatatatacttacatgaaatatcaagatacccttgttgaagaaaaaaatgaaatacatgtaaattcatgaaatattaaattttcatctatttttgaaatatatataaatctggatggatgtggtagttcctgcctttaatccagtactttgcgaggctgaggtgggaggatcacttgagcccaggaatttgagaccagcctaggcaacatagtgagactccatctctacaaaaaaattaaaaaattagccaggtgtggtggcacacacctgtagtcctagctacttggaggctgaggtgagaagattgcttgagcccaggaggttgaggccacccataatcccagccactcgggaaggtaagacagaagaattgcttgaacccaggaggccagctaatttttgtatttttagtagagacagggtttcactgcgttggccaggagggagaggttgcagtgagccaagattgcaccactgcactgcagcctgggcaacagaagaagactccatctcaaacaaaaaagaaaacatacatatatatatatatatatatatatatatatatatactgtataaagctacactaatacagtacccattagtcagatgtggctattgaagtcctgaaatgtttgcattgaagagtgttgtaaatgtaaaataaattgcacatcagattttgaaaacttgttacaaaacaaatttattaataatttttactccaagcttgatggctcatgcttgtaatctcagcactttgagaggccaaggcgggaggattgcttgagccccaggagtttgagaccagcctaggcaacatagcgagaccatgtgtctctcttttttttcagagacagggtcttgctctttcaccttggctggagggccagagtgcagtggtgcaaacatggctcactgtagcctcgacctcttgggctccagcaattcccctgcctcggtgccccaagtagctgggactgcaggcacgtgccaccatgcctggctaatttttgtatttttagtagagacagggtctcaccatgtttcccaggctggtcttgaactcctgaactcaagggatccacctgccttggcctcccagagtgctgggattacaggggggagccaccgcacccagcccgcatctctttttcaaaaaataaaaattaaaaaggtaaaattttaaaaataaataattaaaaaaacattgttttagaggcatagtcttgctgtgtcacccaagctggagtacagtggtacagtcagctcatttttatactgattacatgttgaaataatatttggcatatattaggttaaattaaatatattgttaaaaattaattttacctgtttgatttattttaacatggctgctagaaaaatgatgttaagtacacaagtggctctcatatatatttctttctttattttttttttttttgagatggagtctcgctctttcacccaggctggagtgaagtggtgtaatctcagctcactgcaacctccaccctccgggttcaagcgatttttctgcctcagcctcctgagtagctgggattacaggcatgtgccatcacgccagctaatttttgtatttgtagtagagatgaggtttcaccatgttggcgaggctgctctcgaactcctgacctccacccaccttggcctcccaaagtgctgggattacaggcatgagccaccatgcccagccggctcttatatttctactggacaacaccaatatgcagaatagaactgaagcatttatttatatctctaaatttatttcccccccgcttttttttttggaggcaggatctcactctgtcaccaggctggagtggagtggcacagtcacagctcactgcagcctcgaattcccaggctcaagtgatcctcccacctcagcctctccagcagctggactacaggcatgcgctaccacacctggctaatttttgtattttttgtagacacaaggtttcaccatgttgcccaggctggtcttgaactcttgggcttaagcgatcctcccaccttggcctcccaaagtgctggtattataggcattagccaccacatccggccatctctcaaattcttcaagcctgcataatacagatttgcatgcttggcttatctgttagtaattcagtttttcaacttgctttgctcttcttgggacagtttaaaatttagctatttaggccaggtgcagtggctcatgcccgtaatcccagcactttgggaggccgaggtgggcagatcgcctgaggtcaggagttcaagaccagcctgaccaacatggcgaaaccctgtctctactaaaaatacaaaattagccaggcatcgtggtgcatgcctataatcccagctacttgggaggctgaagcaggagaatcacttgaacccgggaggtggaggtttcagtgagccgagattgcgccactgcactccagcctgtgcaacaaagagtgaaactctgtctcaaaagaaaaaaaaaaattagctatttaatatgtgtgcaatatattcagttttggatttgagtttttacctcacatcaaaacaaaaaaaaatctaattttcatgttttaaatgtgtgagctttaagagtataaatctataaatcataggtttaaccagtatcgtgaggccagtagaggctccaaggcagggggaatataaaccttctttggattggttggctggttgcttaacagaattatgtgactgttcatttctttacagaaacaagttgttccctgaatcagtcatcagaaatattatgtatcaaatattgcaagggctggcttttatccataaacatggtaggtttcttttaagtttaatttccctacctctttagattactgtccagattgtgcatacaaatttattaaactgttaaataactgttatattggataactatgaatctggagtatgtgcctatacacactgacatttttatttaaaaactttatcaatttctgtgattctgtataaaatggaatttctggctggcacggtggctcacgtgtgtaatctcagcactttgggaggccaaggcaggcggatcacctgaggtcaaacgagtttgagaccagcctggccaacatggtgaaaccctgtctctgttaaaaaaaaatacaaaaattagctgggcgtggtggcgggcgcctgtaatcccagctactcaggaggttgaggcaggagaattgcttgaaccccagaggtggaggttgcagtgagctgagatcatgccattgcactccagcctgggcaacagagtgagactccatctcaaaaaaaaaaaaaaaaaaaaaaaaaaaaaatttatatatatatatatatatatatatatatatatatatatatatatataaaaatacataacatacatacataccaggccggactcacacctgtaatcccagcactttgggaggccgaggcggggggggggatcaccttaggtcaggagttcgagaccagcctggccaacatggtgaaaccccatctctactaaaaatgtaaaaaattagccaggcttggtggcgcgcgcctataatcccagctacttgagagtctgaggcaggagaatcgcttgaacgcaggaggcagagattgcagtgagctgatattgtggcattgcactccagcctaggcaaaaagaacgaagctccatctcaaaaaataaaaaaatagaatttctataatctataattatcttccaccacagcagaattttttaacagtttaatcatcatcagcctttagtctcagtcatcatatacccatcttgcaacctcattctccctaattttatcgtggaaatgaaaaaaaaaggaccttcttttggaaaagattagattattttgatctagcatgaccaattattaacacttaaatagtttgtagcacccacggagcagtgttttatagttttccttagtttttacatttagttgtttctattctgtgaatgaaattaaagcaagtattaatacttgatctattttctatgaattatgtacttcaattaatgtagtttttcatatctatcaaatcaaaataattattagtccaaaaagttaatatgattattttttaaaaacatttgtttagaatcactagatgtttagatactaaattagaaaagtttgtcccataccattgctgtgttctgaacataggcactggaaaatcaccattagtttcccttcatgtctcatcctgtattttattttattgctattattattattatttgagacaggatctcactctgatgcccaggctggagtgcagtggtgccatcatggctcactgcagcctccacttcctgggctcaggtgatcctcccacctcagcctccctagtagctgggactacaggcgcacgcttccacacccagctaatttttttcttttttgtagagatgaggtttcgccatttttcccaggctggtcttgaactcctggactcaagtgatcctccaacctcagcctccggaagtgctgggattacaggcaggagccatcacacccatcctcctcctgtagtttatattttgttttttttattttcttaactgctacaggaattatttgccttccaaaaatgctatgcaggattccatataaatattttaagaacacttcttaaacttataaaaagggtatgtttagaatgttttaagaacattaaaaaaaaactttttatttgcaccatatgtaaactattggggtcttttaaaagtctaaatcctgtaatgatatactacactttattggcaaacagcagtaatgtattaattatatggaaataagggacatctgctattttaattattcataatggattcctgatttttaattgttttaaactctggtcagcatggtaacacttgacatttgcctgggttgatttatgctgtcagcaacgtctgaagcataagggattgaaggaggaagttcgattacgatttaaaaattgtgactgaaagaaataacatgaataatcaacagttgactgtagagttggctacatagtaatttgggaaaccagcctataaggatgattagacgtttttacgaaagccacataattcttgctgctaagcatctcagatgtaatacttcaagaaatagatattttaaaatagttgtttggccgggcgtggtggctcacgcctgcaatcccagcactttgggaggccaaggcaggcggatcacttgaggtgaggagttcaagagcagcctggccaacgtggtgaaaacctatctctaccaaaaatacaaaaattagctgggtatcatggcacatgcctgtaatcccagctacttgggacgctgaggcaggagaattgcttgaacccgggaggcggagattacagtgagctgagatcatgccactgcactccagcctgggtgacagagcaagactctgtctcaaaaaataaataaataaaataaaatagttgctgtcaaaaaaatgaaaatatttagttcaaataggactgaattattaatatatgtatattaggatggggaaaacctcagctgtacaaatatgtaattggtttagttctctaagactttatggattagtgtcactctgctgtgcatcacatggtcccattcctgtcgttacattacaaaagtatctgaatgtctcttggacatagtgaaatggatgttacttactatttagagtaagaagtactggataaactcagattacaaaactgttaaacagatgtcacaaacagagcccactctggctttgaagtgattaaaaacatttaggcttaaaaaggcttcccaaccccagctggccgtggtggctcacacctgtaatcccagcactttgggagggtgaagcaggtggatcacaaggtcagaagtttgagaccaccctggccaacatggcaaaatccagtttctactaaaaatacaaacaattagccgagtgtggtggcagacgcctgtaatcccagctattccagaggctgaggcaggagaatcgcttgaacccaggaggcggaggttgcaatgagcccagattgcgccactacactccagagcaagactccgtctcaaaacaaaaaaaaaaaaaaaaaaagaaaaagataaaagaaagtcttcccagctccaaagctacatgaaaaccctcttcaagtgatcacctgcagtctccctgcctcccaaggcctttggaacccaagccatttggatataaccagaatgctgtagactgcccttagaaaaagcctcccttaagacaaatctcatctgccaggagggctttaatgtttgttcttttccccctgggttttctttttcttttctttcttttttttttttttttttgagacagtgtcttgctctgttgcccaggctggagtgcggtggcatgatctcagctcactgcaacctccgcctcccaggttcaagtgattcttctgcctcagcctcctgagtagctgggactacaggcgcacaccaccatgcccggctaattttggtatttttagtatagacggggtttcatcatattggccaggctggtctcaaactcctgacctcatgatccacctacctcggcctcccaaagtgctgggattataggcgtgagccaccacgcctggcccccactgggctttctgcctcattttctttggtttcccttttagcttcataaccatttattttatagattgaattgctaatataaacattataattattgggattttgcaacgacacagctattgaggaaaactgaacattagataaaataattttaaatgaagaaattagttctgatgtgtggagttccatttttattgaatggactttttaaacaagtgatttttctcaagaagtcagctgcactgactcaagcctgattaaaaagtgctcttctcagcctgggtgacgtggcaaaaccctgtctctatcaaaaataccaaaaattaggtgggagtggtggcatgcacctgtggtcccagctacttagtgggccgagaggattgcttgagccgagatcgagccactacgctctggcctggacaacagagcaagacctatcttaaaaacaaaaacacttctcacacgttaattaggtgacttcactctggccctcaacctcctcctctattgcacaatagtgataacagtacctccttcaggttgttgtgcaaatgaatggagataatcatagtgtggtaatacctagcccagtgcctgaacacccactggagtcacaaataaaaataaatgttaaatgggtggttatttttaattatctcatacactgtgtgaactttcttgccaaagcattttaaaagcagggtccctacgccccatttacttcttagacaataaatatggtttacttttttcctaagatgatgttttgaattataaaagagggggttcatttatattttgtttataaatcaaataaagctatgtttaaacgtaatgatttactgtatttttttttctccgtatatcatcaaggcttttttcatagggacatgaaaccagaaaacttgctttgtatgggtccagagcttgtgaaaattgctgattttggacttgcaagagaattaaggtcacagccaccatacactgattatgtatctaccagatggtgagtaggggttatgcagccctcctgaggcataagcctatggtgaaattttcctacgatggattgttacatatttctggaagttccatattgaatatttaaaacacagaattgaattttatattctttaaagaaagcgaaggattggtttattgctattctgatcactgaaaaaaaaaggaaaaagaatttcatttattcactcattcattcattcaacaaatatttattgaacacctactatgtgccaaacatcattttaggcacagagaacacagcagtgaaataaaaaaagaaaagaaaaatctctgccttatgctgcttacatgacagccaatagacagataaacaagttaaaaatattatggatcaccaacagaaagacatacacgtgttcaccagaagacatgaatcctctctactgcacgccacccaaacgtccatgaacagtagcatcgtatactcacccagtggaatgctttgcaacaatgagaacgaagggtctatgactgcatgcagcaatgtggacgaatcttagacaatgttgagatcaagagcccaaagagaaaaagagcacataccatatgatttcatttatgcaaagtacaaaaaaagagaaaactaatctgtgccatgaaagtcaggatagcaagcagttctatggggtggggatgtgtgtagtgcctggactagtgcacaaggggccttctgggtgctgatagcatgtctttcttttttttttgagatggagtttcgctctctcgcccaggctggagtgcaatggcgtgatctcggctcactgcaacctctgcctcccggtttcaagtgattctcctgcctcagcctcccgagtagctgggattacaggcacccatcaccatgcccagctaatttttgtatttttagtagagacgtggtttcaccgtgttagccaggctggtctcaaattcctgacctccggtgatcctcccaccttggcctcctatgcatagtgctgggattacaggcgtgagccaccgggcccggccgataacatgtctttcttgatctgggtgctgggtctgtggatgtgttgtatttgtgaaaattcatcaagctctactcttacaacacatgcctctgcctgtgtgaatattatactccagtgaaaacaagaacatatgtgtatcaggctgggcatggtggctcacgcctgtaatcccagcactttgggaggccgaggtgggggatcacttgagaccaggagttcgagaccagcctggccaacatggctaaaccccgtttctactaaaaatacaaaattagccgggtgtggtgtcacgcgccttggtgccagttacttgggaggctgaggcatgagaatcacttgaaccttgggggcagaggttgcagtgagccgagattgcgccactgaactccagcctgggcaacagagcaagactctttctcaaaaaaaaaaaaaaaaaaaaaaaaggaatatatgtgtatcagatgttgatacattattataaagaaaaataaaataggaaagggggcagggagttgggggagatggggagagaaaggaatgttacatggagggtctgactgagagtagccctgatggagatgccagggccagcaggattttttttaggcagagtaaaagccttgagacaggtgcacgccacacgtgaattctgcacagtgcagaatgaataaggagggcagtcgtaggaaacaagggcagagtttgtagagtggccagaaatgatagtgacttggacctgctggccatgcaggtagtgagaaatgtgggattctaatgaatcagatgtgggggctgaaagaaaggagtccgtgtcttagtgtgtttttttgtgttgctgtaaaggaacacctgcggctgggaagttggtaaagaaaggaggtttatttggcttccagttctgcaggctgtacaagaagcatggcactggcatccgcttggcttctgatgtgggtttttatgctgcatcaaaacatggtggagaaggtcaggccgggcgtggtggctcacacctgaatcccagcactgtgggaggccaggacgggtggatcacctgaggtcaggagttcgagaccagcctggccaacgtggtgaaacccagtctctactaaaaatacaaaaattaggccgggcacagtggctcacgcctgtaatcccagcactttgggaatccgaggcaggtggatcacgaggtcaggaaatcaagaccattttggctaacacagtgaaaccccgtctctactaaatatacaaaaaaaaaaaaaaaaaaaaaaaaattagacgggtgtggtggcgggcacctgtagtcccagctagtcccagctacttgggaggctgaggcaggagaatggcgttaacctgggaggcggagcttgcagtgagcgaagatcgcgccactgcactccagcctgggtgacagagcaagactctgtctcaaaaacaaaaaaaattagccaggcatggtggcacatacttgtaacttgggaggctgaggcaggagaatcacttgaacccgggaggtggaggttgcagtgacccgagatcgcgccattgcactccagcctgggcaacaagagcaaaactccgtctcaaaaaaaaaaaaaagaaaagatggcggggtgaaggtcaaaggggaaatgggcacgtgcgagaagggaacaaacaagaggaggaagcttgccgtggagcaacccactctctcaggaactaatttcatcttgcctgaaaaagaactcattcactacgtgagaacagcaccaggcctttcatgagggatccgccctggttacctgcgaatgtgaccttattttgaaatagggtctttgcaaatgtaatcagattaagatgaggtcagaccacagcctggctggtcttaatccagtaagactgatgtccttataaaaagaaggcagacagagagatggaagagggaagacacgtgaaggcaccttgggagaaagcagtgtgatgtacactttaaatggatcaactgtatattatgtgaattatatatcaataaagcttgtaaaaatattcgtcaaagtatagtaagttctcacttaacatcatcagtaggttcttggaaagtttcactttaagtgaaacaacatatgatgaaaccaattcgaccataggctaattaaagtaaacaattttatggcacgtttctggtcacaaaaacatcaccaaacttcttttttttttttttttcctgtcacccaggctgtagtgcagtggcacgatctcggctcactgcaacctctgcctcccggattcaagtgattctcctgcctcagcctctcgagtagctgagcttacagacgcccaccactacacccagctaagtttttgtatttttagtagagacggggtttcaccatgttggccaggccggtctcgaactcctgacctcatgattcacccgccttggtctcccaaagtgctgcaattacaggtgtgagccactgtgcctggccaccaaacttctaaatagtgaccaaaacactaatattgaacattgaaatacatgtaagctatacatacatttgagaaacattaataaaaacaaggaagataattattcgccaagttattctagttcagggtcacaggtggcaacagcgtgtcctggaagctgggggtgcaaggtgagcaccaaccatggacgggacagcctcccatggcagcacgccccctccccaccccccccccgacacacacatgcacacactcatcctggggccacacaggcaccccagttcacctgacatgcacatatctaggatatgggaggaagctggagtcctggagaaaacttgtagacttggggagaatgtgcaaaccccacacattggcccagccagaaatgcctttctttttttttctttctcatcaacattacaatgaaacaacattgagcaaaaacaacagtgaacaaaactagtttatttgagggcttgcagtattctcaatgaaagcaaaaagacagtatgccaaacatttggactgaaatatttacacattttggttggaaaaaaagagaattgagagtgtcttccatttagcagactttgtgttggactcaccagctcactttgctcttgtaaattgagtatttttctcaattaaaaatattgttaggctgggtgcagtggctcatgcctgtaatctcagcacttcgggaggctaaggcaggctgatcacctgaggtcaggagttcgagaccagcctggccaacatggggaaaccccgtctctactaaaaatacaaaaattagctgggcatggtggtgtgcccctgtaatccccgctgctcgggaggctgaggcaggataatcacttgaacccaagaggcggaggttgcagtgagccgggaccgcgccattgcactccagcctgggcaacaagagcaaaactccactcaataaatatagttgactacagaagaggagtcagttgaggatatcagtactttcaaactgataaaaaaaaactccactactcaggatataatcctgttcatcttttgttttctgtgcttccttgtgaatagatgctgaatataatgctttgtaacatagtttttctactttttttcttaatatatcagatggcacttatttccatatctattcagttgagttcctgtcttaggcttgatggacatttcatagacatttgtctccagccccactcattgtctgtgatcagggaacatgtgttgtgtcctattatccccagaacattgtacaaatgcctgacacacagatggaacagggtctgaatacctgttccttgatggaaatgcatgaccacacagcgtagaatgctactgcccatccacctttgaaattgcaatcaaaattacctcttttgttctctattttcataggtatcgtgcccctgaagttttactgagatcttcagtttatagttctcccattgatgtgtgggctgttggaagtatcatggctgaactctatatgttaaggccacttttcccagggacaagtgaggtcgatgaaatctttaaaatttgccaagttttagggactcccaaaaaagtaagtactcttgtccctaagttgctataacttttgattatttctatcttgctactttgcttttaattttataattttgattatttacaacttttgcctagatatctgatattttcattttgaaataggctcatactttaatgattaattttcttataattctttttttttttttgagatggagtcttgctctgttgcccaggttggagtgcagtggctcaatctcagctcactgcaacctccacctcccaggtttaagcaattctcatgcctcagcctcccaagtagctgggattacaggtgtgcaccaccacgcctggtcaatttttctattgttagtagagaggagatttcaccatgttggccaggctggtcttgaactcttgagctcaagcgatctgcgatctgcccacctcagcctcccaaagtgctgggattacttggtgtgagccaccacgcccggctgtaatccttatttttttaatcggagtgggttaaggattgcaagaagccagaatcccaccagctgaagaaaaacaggtgcttgcctttccttaagaacttcaggaaaaattctgtgtgtttagagtgtaacttgggggtgatgcccagctgacactgtacagacagccttgcttgagctctttcctgctcattctgtggctggccattggcatcacctgttaacccctggtgtcttgaaccttgttttttcttaaccgtttcttgtttccttttttatatctcccctgtggatatttgacttcttgaactgagtgcttttcaattaactatatttcatctacacctttctttctgaaatgtgctttataagtgtgtatataatgacatcctaattaaattagtaagtgccttgtagttaacattacacaagtaaatgtagatattaaagctttaatgtaattgtcatttcccagatatgtgcatttttaacattgtatgcaatgggtaatatacacgacaaggatctttgttcacagtcagcctctttgtaaagcacttttccttatttgttcagagttaacccaggtatcatcacagcaacatcaccatcaggatctaaaaccagacaagagcttaatattgcaaaatttataaaggcgggcatggtggctcatgcctgtagtcccagcactttgggaagcccaggcaggaggatcacttgagcccaggagttcaagaccagcctgggcaacatagtgaaaccccgtctccacaaaaaaaaattagccaggtgtgatggtgcgcacctgtagtcccagctactcaggagtctgaggtaggaggatcttttgagcccgggagggtgaggctgtagtgagccatgattgctccactgcactccaacctggataacagagccagatcctgtctcaaaaaaaacacaaaaaaacaaacaaaaaaaagctataaaagtgcttttcgcattgtttcctaactctcagcttaatgttctttctatactgtcgtagcactaaattatagacgtggtctggtatttcattttcatgtttatatggatcaacatgaaaatgttcaaacataaatgatgtttatattactgctgtgttttttaaatggattactaaaaacaatttgttttgccctccccacctgcacttatatattcctgaaacagagtgactggccagaaggataccagctggcatcctctatgaacttccgttttccccagtgtgttcctataaacttaaaaactcttattcccaatgccagtaatgaagctattcagctcatgaccgaaatgttgaattgggatccaaagaaacgaccgacagcaagccaggtaagaggagtcttcctgttagacctttaaaaatgtttaggttttgtaatatcagggatgttttcatttacaaaggcaggtctattctcaaccaggattttactaagagaattaaacacaaagtcctaggcatccagcgtatgtaataaattaatttctaggcatataatatcattgggagaaatgcagaaatagccacaccaatgattttctgagttttgtggttcaaatgaagaaccctgaggttgcaacaaggaatcaatctgcaatgataaaaattcagacctgcgacagactagttatgaaggaatctgtcatggaagcaaaaaggcatctcatgaatcattccacatagtagactttcctatgctgcctttacagtttaggggtgggattctggttcactttatacaacagtatcatcccttgctgggactggagtgtgcagcctctggctgccacaagagggcagcattgtggcacccaggctttgttcctttgtgactacacctgacatatctacagatgtattccaagtctagggcctttaaacccagtgtttttgtctgcaaggcttcaataaaaaggcaataataaactttattgtattctcatcatttaaatataaattccatgtgaaaattacaaaaatttattttgctttttttaaaattaatcttgagaaaatgttttctaaatgtcatctggaagaacaaatgggaaaggatagtcaagatatgttaaaacaagaataaggaattagagagcggtgatagggatggacagcttgccccatcagatattaaagtaatctttaaattgatgatggtaacagtggaagtactggcataagaattgacaaatagctgaatgttgcagaacatatgagtcagcacaaggtaaacaaacgtggcatcacaaagaggggaggacggctcagtgggtgatactgggaaaattcattagctcttagggaaaaaaataaattgaggtccttactgctcaccatactttacaactcacagaagggttacattttgttgttgttgttgagatggagtttcactcttgttgcccaggctggagtgcaatggcatgatctcggctcaccgcaacctctgcctcctgggttcaagtgattctcccaccctcagcctcccgagtagctgagattacaggcatgagccaccacgcctggctaattttgtatttttagtagagacagggtttctccatgttggtgaggctggtctcgacctcccaacctcaggtgatctgccctccttggcctcccaaagtgctgggattacaggtgtgagccaccgcgcccgaccaggattacattttcaaagtgtaaaaaaaaaagcaccctaaactgttagaaacaaaaggaaagcatacatgtgtatttgatctcaaggtgaaaaaacacgggtataaaaataatagaagaaaccacaaaaggaagattcaaacaatttgattacataaaaagtaaaatttttctctatgtaaaaatcttaaaatggaaagataagacagagaaaattatttttaattcttaatataatactcctacagaaacacaagaaaaatactgaaatgtgtatgtgtattttcttttttttttgagatggagtttctgttgcccaggctggagtgtagtggcatgatctccactcactgcaacctccgcctcctgggttcaggcgattctcctgcctcagcctcccgagttgctgggattgcaggtgcccgccaccacgcttggcttatttttgtatttttgtagagaccagaggggtttttttgtttagtttttttttgtttttgtttttgtttttgaaacggagtctcgctccatcgcccaggctggagtgcagtagcgtgatctcggttcactacaccctccgcctcccagatacaagcaattcttctgtctcagcctccctagtagctgggactacaggtgcctgccaccacacctggctaatttttgtatttttagtagagatggggtttcaccttgttggtcaggctgatcttgaactcctgaccttaggtgatccacccacctcggcctccctaagttctgggattacaggaatgtgccactgtgcctggccagagacggagttttaccatgttggccaggctgctgttgatctcctgacctcaggtgatctgcctgccttggcctcccaaagtgctgggattacaggcatgaaccactgtgcccagccgtttaagtgtattttctaatttttcttttttaaaattttttgaaagttttgtttctttaaagatggggtcttactatgttgtcctgactggtctcaaacccctggtctcgtgcagttctcctgccttggcctcccaaagtgctgaaataatataggcgtgagccaccacacctggcccatattttctaatttttctaaacattcattaccttcataataaagacataataagtttttcaaatgtattttaaaaagaaaagtagtaatgggacatgaaaaagaaacacaggaaaagaaatacagattacaaaaaatattttttaaatgttcagtctttgtttactattataaaatgcaagtagaaatgagataccgtttttcatttatctctcttagtaagagaaagtaattttgtagtatataaaaagagccttgaagacaatcagaaattatgctcaaagatgttcaattccaatagaaaactgtacattgaaagttaatcaaaatgtttccaaccatgtgcggtggctctgcagtgccgcacacctgtaatcccagcactttccgaggcaggcggatcacttgaggtcaggagtttgagatcagcctggccaacgtggcagaaccccatctctactaaaaatacaaaaaattagctaggcatggtgacacacacctgtaatctcagctactcgggaggctgaggcagaaggatagcttgaacccaggaggcggaggttgcaatgagccaagatcgtgccactgcactccagcctgggtgacagagtgagactctgtctcaaaaataaataaataaataaataaataaataaataaataaataaataatgtttctaaacttaggttatgtgcatctttaatttggaatatactgccagcattaacagtgaatttgtaaaataaaatttttaaataatttgggagaaatctcatgctaaaatactattatacaaataatatgattttgtttttgaaaaatatattttatatgatgagaaaaaaataccgaaaagtataaaaaatgttagtcttggttgtctctgggtgttaaatttttatttttgtcttgagaactctatacgtttctcattctctacaatgatcactgcttcccttaagtaaataggaaaaaataaatgctattaatttttaaagttttccctcttcttgaaggatagtaactggtatcttaaagtatcttaaaagggaagagttggccgggcacagtggctcatacctgtaatcctagcactttgagaggccaaggtgggcggatcacgaggtcaggagcttgagaccggcctgaccaacatggtgaaaccctgtctctattaaaaatacaaaaattagctgggcatggtggcgtgtgcctgtaatcccagctactcgggaggctgaggcaggagaattgcttgaacccaggaggcggatgcagtgagccaagatcgtgccactgcactccagtctgggtgacagagcgagactccatctcaaaaaaaaaaaaaaaaaaaaagggaagagttgttataaataaagccttgaaattacaaaacacatcctcaaagtttccagctccaaaatatgcatcattaatttaggaatattgacatactaattacttaatgtgacttaattcagaatttgagtaccttcagtgtgctaggcattgaagtattcaaattatgtatatttgtgtattccactgagaatgcaagtaacccttaacaaactctttcttgtgctctgtttcacagccctgctttttagtggaagtggaaagacctaattagggagagaggttggttaagttgtagaatatgaagaccatttaaagtaccaagctgccttctgttcctctaaaaactgcccttacacatgggaggagttaactgttggtcagggctatgttcccacctatgtggggactggctaaaggcaggaggttcaggggaacagagcttgaccatcttaaggaacccatccccccaaaaatgaccagctactttgcccaggtatttgatgccaataagggaatttttccatagctgagctacacaggctttagacattctgtagaatattttttcggttttagccttactgacgttgtgaaccagataactctttgctgtggggtgctattgtgtgcattatgggatagttagcaatgtccctggccctctagacactagacactagtagcgtcccccaacccctgtcattataataagaaatgtctccagacattgccagatatctcccaaggggcaaacttgcctccatttgggaagcactgctattagatggtgccacccatacaccagggggtcctttccctctcatgcaagcagtcaggtgactgatctagataaaactcaaacagtgatcatttttcataatatttttatattttcttcccataaatgtcttctctttgctggtataccgatgaaataaacttcaacagtatgtgtttgttgtcccctctttagattttttttttattactagtaggtatattgttgtactcaggctgagagtaacccggaattttacatacagctctggttaatcatttcaaataatctatatggaagattttcttaattcactttttaatgtctttgagtgtactctaaaccattattggtgtgtagtattttagcttgaagtaatcacattaatttagccaatgtctataaattacattttattttcactaacaaatctttaaataaatagaacagctgttttgcttagatgttataataacaagtgagctttctattttttcctactagtacttttttttttttttttttgaggtggagtctcgctgtgttgcctaggttgaagtgcagtggcacaatcttggctcactacaatctcctcctcccaggttcaagcgattctcatgcctcaccctcccgtataactggggttacaggcatccaccaacacgcctggctaatttttgtatttttagtagagactgggtttcaccatgttggtcgggctggtcttgaactcctgaccgcaagtgatcctcccacctcatcctcccaaagtgctaggattataggcgtgagccaccatgcccagccacttttaattttttaatgcaatttatttctcaaatcatttttttctggttatcttttaaaagaggcactgtatagggaatgatggctgctttctaaatctttgaagctcatgtgggctaatgataaatgcctcgcacagggccaaccatagtttatgtgcaatacatttaggtggaactgttttccatttgttgttttctctgtgtttttataggcattgaaacacccatattttcaagttggtcaggtattaggcccttcgtcaaatcatctggaatcaaaacagtctttaaataagcagctgcaaccattagaatcaaagccatctttagttgaggtagagcctaagcctctgccggatataatcgatcaggttgttggacaaccccagccaaaaactagccagcagccactgcagcccattcagccgccacagaacctgagcgtccagcaacctccaaagcaacagagtcaggagaaaccgccacaaacgctattcccgagcatcgtcaaaaacatgccaactgtgagtagccagtcatgacacttgcaatgaaatagtttgactcgtgcaattaagatttttttcgaggcatttctaataatgttggaaaagatataaaagatttttctttgttaaagaccctgagtcctctggttggagcttgacatgagatcacttaaaattctaatatggtttataaaaagaaaaactttcaggataaaagtaaccaagtttacatgctacagtcttcagtcttttttctttttctttttttgagacggaggttcgcttttgttgcctaggctggagtgcagtggcacgaccttagctcactgcaatctctgactcctgggttcaagcgattctcctgcctcagcctcccaagtagctgggattacagacgcccaccaccacgcctggatatttttttgtatttttagtagagatggggtttcaccatgttgtccaggctggtcttgagttcctgactgcaagtgatacacccgccttggcctcccaaagttctgggattacaggcatgagccactgcacctgggcttttcttttttatttcttgagacggagtttcactctatttgcccaggctggagtgcaatggcacgatcttggctcactgcaacctccacctcccaggttcaagcagttctcttgcctcagcttcctgagtggctgggattataggcacccaccaccacacccagctaatttttgtatttttagtggagaccatgttggccaggctggtctcgaactcctgacctcagatgatccacccatctcggcctcccaaagtgctgggattacaggcgtgagccaccaagcccggcctaaaattctttcaatgcagaagaattcaaagaaagaatttaaaagaatcgggtactccagagtactgatcctaaatcttaagaatttttaacagtactttcattttacagtgttcttaaatgctaaggaacatggagagaatgggtttttatttattattattattattattattttgagacagagttttgctcttgttgcccaggctggagtgcaatggtgtgatctcagctcaccacaacctccacctcccaggttcaagcaatcctcctgcctcagcctcctgagtagctcggattacaggcatgtgccaccatgcccagctaattttgtatttttagtagagatggggtttctccatgttggtccggctggtcttgaactcctgacctcaggtgatccaccctccttggcctcccaaagtgcttggattacaggcctgagccaccgcacctggccagaataggtttttaaagtgtcaggcatagtataaaactttttcttccatcttttgttcagctccaggagctcttcagttgctgtagtattttagctgtcccactgggtatacactcccaaatgtgtttgcattatggcattttaggatggaaatcggtcttatacagcactgtatctatttccttccagtccccaactgccccaccaacctagataagcaaggcctcctcgtcccccaatagcactaatcacattctaacatactgttaattacttcttatgtttattgtttatttgtctcttcctctggaatgcagcaagctcagtgaggtcaggaatgtttgtgtgtttatcagtacagcctcagcaccccgaccagtgcctgccacatggtagattctcagtagatatttgttcagtgaatgaaggaatgaataattgcccacatgacttgtaaaccacctctggggtcctggggagtccacttttatctttggaacagttctgaatattagaaagttcttccttaatactgggtaaaatctggttttctagcttttaatgaaggctaatcacttttctagaaaggcagccttttagatatttgaaaatagcccttatattatctgcccttttctctagagaaacttctccaattcccttaagggctctgcatataacaccattcaccaatgactgataactctcagttcctattatgaatgtgtctttaagtcccctctcatcttgctttccacttagaatgaggttgccagagctagaggcagacagcaggcagggaatatagagcagggcgaatcacctccgacattctaaaccatatgtgcactcgtgccaccaacgatgacagtcctccccatgaccccttggaagatgcatcaattgttgactcatattgtgagggaaggaaaggaagttaatatttattgagtagcttccaagtgccatgcatatgcgagggacgctgtgtgcattctctaagttaaagagaataacctagcccccagccccgccacacacacatttttatataggtgagttccagagctgggattaagtactgtgttaactaaaatttctaagtatacctgttttttcacaaatgcttctcctaaattgcatattctgtacctctgacttgtgtatttcatctctaggattcaaaaagttgcaagatctcttacctcttcaatttctaattatttttgaatctgtattttttcttctcagtttacccattctgcccagcttgttgccagctgtgtatttgtttagttgtctgttttgctcctgaatcttcatgatgaatagaacgaccgtgagatcttgggcaggctactagaacctttctctagattgacgttgatccatttgtcagtactgttggtcaagttcttcaactatgtgctgatcccctttgctgccttcacccactgggctgaagtccacatacactacactgaatgaattcattgtttgccttttatgaaaaagtgtggtctatatgagctatcactgtttttccttagtgctcacaaacatcccctttaataattgattttagaatctttgccctcatcctctaccaaacttactgatgtggagtttgcaaaaataaatcttctactttattaaaagtattatatttgcccctttccagtcttctcagccataccagattcttgcatatcactgatattgttcagcagtgttcaggatcagtaccctaaaatacaattcaacagaagggaggctcaaactcagctaagggtaaccttttattaaccctactcatctggagcttaacattttttttattctctttattctggagattgttgtgcctggcagagaaagtaatagtgtagagaagctggcaaatactgctttttgttatcatccatcactatcactgtaataccgtcagcttcaagcaatagcatgtccattctttaagaatctccctgcacccaacataggtgtattttctgaaaattttccatgctctcttccctagttttgagttgccttttggatttttctgtttatgtgcccccaaaccactttctgtaaatttgtataaaaccaattcattgtgtgctctaagccaggacttctttcccattccttatttctgttaatgatgcctccattctgtgacagtcagactcatacttccctctctgtttccgttaggattacattcagggacttatgacaaaaactcgaccactgtggcttaaacaatagggattgttgttctcagataacaagaaatcgggtggtgggtagctggagctcatgaagcttgcagaggaggcaggctgctgctggcttcccgctccaccaccctgagcaggtggctttcattcctgtggccacaggatgactggtgttcctttggatgtcgtgtctgcattcaaggagggggaagagtaaaagatgctggcacatgccagccttagtgtccttctcattaaggctgtccccacttaaggaggacactaaggctttgagaagttaagtcacttgcccaaagagcatagccaagtctcaggtttccagatccttcctgtcaatgaagagtcaactcagatcctaaatattcaagtctctcaccaacctagttcacagagatctctcctctgaacacctatcatatttttggcatgtaccgcccatttttgttcatgcttttaaatgtgtatatatgttatgcccttacatgtatggaacgctccttgagaatggggactgttagtgtcttacatagatagtagcttgtgcatgaaaggcattcagtacatgattaaagattatgatgactgattttccaccacagaagccaaatggcacactgagtcataaaagtggtaggaggcgttggggtcagactatcttcaagtctggagatagctgggaagagttggaggactatgatttcggagcctcccattccaagaagccaagcatgggtgtttttaaagaaaaaaggaaaaaagattctccatttcggtaagatttcaaattcctcagaaaaatatttttgccatgcattaactttattttactcattaaatataaatgcatgtagaccctaaaagaagaaaagtttgcttaacaggccaggtgtagtggctcaggcctgtaatcccagcactttgggaggccgaggcaggttgatcacttgaggccaggagtttgaaactagcctggctgacatggtgaaaccccgtctctactaaaaatacaaaaattagctgggtgtggtggtgtgcacctgtaatcccagctactcgggaagctgagacatgagaatttcttgaacctgggaggtgaatgttgcagtgagccaagattgtgccattgcattccagcctgggtaacaaagtgagactctgtctcaaaaaaaagaaaaaaagaaaaaaatttgcttaatattggtgccttccacaaaacacaaatctttccacatacttctgaaaaggtaagaatcttctcacagtaacagttctcagtattaacagatgagtggggtgtgtgtgtctgtgtgtgtgtgtagagagtgtgtcagtccgtttttacattgctataaagaatgtgttggcccatggttctgcaggttgtacaggaagcatagtgccagcatgtgcttctggtgagggcttttggaaacttagaataatggcagaaggtggcagaggatccagcctgtcacatggcaagagagggagcaagagagagagggaggaggtcccagactcttttaaacgatcaagtcttgcatgaactcagagtgagaactcactcgttaccgcaaggatagtaccaagccatttgtgagggatctgctcccatggtccaaacacctcccgccaggccccacctcaaaactggggattacatttcaacatgagatttagagaggacagatgtccaaaacgtatcagaggggatcttgttccatttttacgatgctcttgtgaatgacaatcattattcccatttgaaattgacatgcctcgttgcaggaagtagagcaccacgtgccaagttaacagcttcttctgatggtgttaagatttcactaactgcctcctcgctattctaaacttttttcaatcattttctgagccttttctggaagtttaatatctctagcagttcctttactttttataagtgaggtcatccttagtacattattcgactttgaagttaggatgggttaagttttggtgaatattttggaaagatactttcttttttttttgttttcctctttgaaacagaagaatagaaagaacaagtgtgttatgagtcaggaaaacttatacaagtagctatttggcatgacatagtatggaagtcttcactttggagcacgaggaatctctaaggagtacatatgcttggataattctttttttgcttggataactcttatgcaatccgtttccaggtcttcacattccataggtactctttcctaaaaatacatgaactggaggaaaagcccactcaagtcctcttccactctaggcaagaaagtcacacctctcagttatttcaactcttacatggcatagggttactaaataaagggacaaatcagaaaactggctttctgttggttcttgtcttacagaaattgggtacagtagtcccctgaatctgcagtttcaccttccatggtttcatttacctgcagtacggtgcaataagatattttgggctgggtgcggaggctcaatgcctgtaatcccagcactttgggaggctgaggtaggtggatcacctgagttcaggagattgagaccagcctggccaacatggtgaaacctcgtctttactaaaaatacaaaaattagctgggtgtggtggcgggcgcctgtaatcccagctactcagcaggctgaggcaggagaaacttgaacccaggaggcagaggttgtggtgagccgagattgtgccactgcactccagcctgagtgagagtgagactccgtctcaaaacaaaaaaaagatatttttgagagcacattcacataacttttattacaatatattgttttaattgttctattttagtattagttattaatgttaatctcttgctgtgcccaacttataaattaaacttcctcataggtatctatgcacatacatataggaaaagatgggctgtatagggtttgatactatctgtggtttcaggcatcctctgggggtcttagaacatatcccccacacgtaatgggggctactgtattttagcccatgttggaaagcatggtgatttggaaacactgaagcaccaggcgttagtgatgtgtattctttcaaatatactaaaatgctctgtttcctctttgaaacagaagaataggaagaacagttgtgttatgagtcaggaaaacttatccaggagctctttggcatggtatagtatggaagtcttcactttggggcacgaggaatctctaaggagtgcatatgcttggataattcttttttttttttttttcttttttgcttggataactcttaggcaatccgtttccaggtcttcacattccataggtactccttcctaatctgtgtgtttaatccatgggttttcaaaacacatggattaaaattttacttatttgaggatcagagtgtattatggataaggtagttaaaacttattttatcaagccataccatgaaatactccaattgcagtcaatcctcacaatatttcatcttataaaatactgtttctatctgctgttaacaagaaataaggaacaaatttatgatgaaaaattatagatgtctatttaaagatgtgcagggagttacataatttaaaaaacaattatttgggtctaggaacagaagagtttgaagaccactgatgtagtatatgggagatttgaaacattttttttcttttttttctttttgagacggaatgtcgcttcattgcccaggctggagtgcagtgatgtgatctcggctcactgcaacctctgcctccagggttcaagcaattctcctgtctcagtctccttagtagctcagattgttacaggcgtgtgccaccacgcctggctaattttttgtatttttaatagagacagtgtttcaccatgttggccaggctagtcttgaactcctgacctcaggtgatccacctgcctcggcctccaaaagtgttgggattacaggcatgagccaccgcacctggcgacttgaaaacattttttaaaacccatgtcattctgatttcagctaaattttattcataattatttataattattcataatttattcataaattttagtcatatatttttgaggatggtagaggtttgaatcaaaacctatagttaagatcaaggttgtggctgttcatggtggcttatacttataaacctagcactttaggaggccgaggtaggtgggttgcttgagcttaggagtttgagaccagcctgggcaatatggcaaaactccatctctacaaaaaaatacaaaaattagccagatgtggtagcccacacctgtagttcgagctactcaggaggctgaggtgagaggattgcttgagcttggaaggccgagccactgcaccccagcctgggcaacagagcgagacactgtctcaaaaaatcaaaaaaagatcaaggttgtagtctatatacctgtttctagcaagggaacaattagtaaatttcttcaacattaattatcccttttctcttgaaattctttagaaaaactgtatgacagtgaatttttcatgtgggtatttcttctactttttttttttttttttgagacagtctcgctctgtcacccaggctggagtgcagtggcgcgatctcagctcactgcaagctccgcctcctgggttcacgccattctcctgcctcagcctcccgagtagctgggactgcaggtgcccaccaccacactcggctaattttttgtattttttttagtagagacagggtttcaccatgttagccaggatggtctcgatctcccgacctcgtgatccacctgcctcagcctcccaaagtgctgggattacaggcgtgagccactgcgcccagccatttcttctacatttttattttttggtatctttcaatggtcttgtacaattctaggcatatggttattattatgatcatcattattattaatatactaccatctgttaagctcctgcctaaactttataattttcatacttcagtaaaaatatctgcagagtaggatgctgagacttggataggctgggtttcttgcccaagatcaggtaaggattaattcaaatccaggtctttctctcttctaccccacactgcttctttagcaataggagctgaattggtgaattgttggatttgtgaataggagctgaattggtgaattggtggatttgtgaataggaggtgaattggtgaattagcggagtggtgaacaggaggtgaactggtgaattagcggagtggtgaacaggaggtgaactggtgaattagcggagtggtgaataggaggtgaactggtgcattagcggagtggtgaataggaggtgaactggtgaagtagcggagtggtgaataggaggtgaactggtgcattagcggagtggtgaataggaggtgaactggtgcattagcggagtggtgaataggaggtgaactggtgcattagcggagtggtgaataggaggtgaactggtgcattagcggagtggtgaataggaggtgaactggtgaattagcggagtggtgaataggaggtgaactggtgaattagcggagtggtgaataggaggtgaactggtgaattagcggagtggtgaataggaggtgaactggtgaattagtggagtggtgaataggaggtgaactggtgcattagtggagtggtgaataggaggtgaactggtgcattagtggagtggtgaataggaggtgaactggtgcattagtggagtggtgaataggaggtgaactggtgaattagtggagtggtgaataggaggtgaactggtgcattagtggagtggtgaataggaggtgaactggtgaattagtggagtggtgaataggaggtgaactggtgaattagtggagtggtgaataggaggtgaactggtgaattagtggagtggtgaataggaggtgaactggtgcattagtggagtggtgaataggaggtgaactggtgcattagtggagtggtgaataggaggtgaactggtgcattagtggagtggtgaataggaggtgaactggtgcattgaacagaccctgccatcccctgcttggtctctcaggcagccagggcctccccataaagaatacagagtaccaaatactaacatgtataccttttatttaatggttgtcttattttttaaattattattatgattgagatggagctttgctcttgtcgcccaggctgagtgcagtggtgcgatcttggctcactgcaacctctgcctcccgggttcaagtgatcctcctgtctcagcctcccaagtagctgggattacaggtggccgccaccatgcccagctaatttttgtatttttagtagagacagggtttcaccatgttggccaggctggtctcaaactcctgatctcaggtgatccacctgcctttgcctctcaaagtgctagaattacaggcgtgagccactgcacccagcctggttgtcttcttaaaagtgaacaaaaagcaagatatttatatttagatttatacttgtatttatattcagtagatgtttactaaatacctagttggaattaagcctctcttcaactcatcaaatatatggcaacagaaataagacctccagaggactataacacatgacaagtgtgtgcatttagtgccactagtgacagctgcaaggagctctgggagttctgtctatgggcagagatccctctgatgaggacagaaaagtctttttagagtgagtagttttgggaatgggtagaatttcagttagtgatataacagcagtgggctcaggggaagggaaagttgccagaaatggcgggactgttcccattgaagcagacgcacctgtgcctagaactgcccccaagcaggtggccagcagttcaaagggccacccaagtgagtatccatttccaagggagccaacttggtgagtagggtttggtagcatgaatttctaggtggaaaccatggatgcttggagttaacaagtgatggaaattgggcagtatattcaggccccagcaaagaaggagcccagtcggagggtggtggggagaaggttggtcgtggagggctcattacagcacacagagggatgggcagcaacacaaagcaatggccgcctcacgcactgctgcctggtcaaacaggcctcagggacaggcctcgggaatgagacagaactaagcctcgaagcagaaagtcctcagtccgtacacagaaacaggactgtgggagttagggaccaacaggcagagagtcagtcttaatactaacaaacaccactaaacagctagcgaggtgcttagccactgcacaagtctgttctggctgagacacaggcatgtctccacaaatacctattttctgtgcctgacactagggtgacgggaaattgtatacgggagcttttctagcacttctttccccatttcagttttttaggccatccaaaccatgccccaaacaacctcattgattgtaaattattttagtcaacaggtgaagatggctgttatttccctctcagcacaccagtttcccacgttatgaatccaactgcagccgttgcaggacagatagaaacatgttacacacaagtaaattgctgctcagttataaaggttcctgtcacatactggtatcagaaatgagtctgtgcacgacccaatatctacgcgggtggaggggaagttgtcacttagccaaaagactgatggaaaccatttaagtgaggtcagattgactggcttaggaagatgtgcagagggtgggcgagatgtgcagagggtgggcgagatcctctcgttgttcgtgctgtaatgctacctttcattggctttcaaggcttccagagccagtaccctcaggctccaaccactcgacaggggaaaacaagagcttacctgctgttacttccctaaaatctgattccgaattgtcaactgctccaacctctaaacagtactacttgaaacaatcaagatatcttccaggtaagtagagcaaagaaaatgtttgctgctaactagagtatagataggtcaggttcaagtgtcttggaatctccaaagaaagggcagcagtgaagcaaaaaatctaatcacagagctctttggtagctcagtctgtcgccaaggacttttctggacctcctgtttctaccactagtagaattctgctcaagaaatgcttaggagcaaaaatcaagatgatgaatatgcttccagaaaacaccaacccccaccccccaccaaagctatgcattcagtaaatcctaaattttattaagccaattctatgcccccattacaactttttataaaatgtagattttcaaatactctttcctaaatgatctggtgtacatttttttgtttgtttgtttttttgttttttttgagacagattctcgctctgtcgcccaggctggagtgcagtggcgtgatctcggctcactgcaacctccacctcccaggtttaagccattctcctgcctcagcctcccgagtagctgggactacaggtgcgagccaccacgcctggctaatttttgcatttttagtagagatggtgtttcaccgtgttagccgggatggtctcgatctcctgaccttgtgatccgcccgccttggcctcccaaagtgctgagatgacaggcgtgagccactgtgcccagccaatctggtgtatatttttaaaagattctgcctgctcggaagagcatgctgggaactcaagagaggcaaagacactggctaagaggccactgcttatgtccggatggggtggggtaatgtaaatggctggttccagagtggaagtggcagaggtacaagtgggcaaaacctagacatgttttggtactggaaccaataggacttgtgggtagattggtggaaagaattagtggcagcatctgaggttttgacttgggaactgggtgaacggtggtgactttagctgagaaagggaagattagaagaggagaagattgtggaagtagagaatggagagctgagtgcgggatgcctgttaaacatctgaattgatccatctaatgggcgcctgggtatatgaatctggagcttgggagaaagatctggacagacagtggggagtttatcatgtgcctgcaaatagcattttctcctctaaatccaaataaaaaggaaatgtttcaattcaatttaatctaaaagataatccatttttaaatcgtcctgtatctacacagatacatctttaatccagtgagggagaagatgatctttttcttttgtgtttttgtgggcatggtcatttataactttctaaacacgagtgggccactgtttaactgaggaagatttgcttttcacatctaagtctcctgaagcaagacacagtctccatttcccagaagcttgtttgggaagatggggcatggcaaacaagagaaaaggttgagacaggattgccagcaaaagatggatctgtaacacacttccctgtgtaccttttaggcaaacatagaaatttcagttctaagaatccagctagggctgggcacagtggctcacacctgtaatcccagcactttgggaggccgaggtgggcggatcacctgagttcaggagtttgagaccagcctgaccaacatggtgaaaccccgtctctactaaaaatataaaaattagctggacgtggtggtgggcatctgtaatcccagctactcgggaggctgaggcaggagaattgcttgacccaggaggtggaggttgcagtgagccgagatggcaccgctgcactccagcatgggcaacagagcaagactgtgtcaaaaaaaaaaaaaaaaaaaaatccagttgggaccctctcttgctgttagtaattggggaaaagaaaaaaaatgaaagcaagtagagggtttagagatgaatgggagagaaaacagaaggcacggtgggtgtataggtttagccacaggtgttgaataagttgatataaacttacagggggtgaattgaggctttaggactgcagtcctgtgctgatttgtaaggaggaagacacgtatttgtatttgagaggttgaagaaattggcatgaagccatcaagaacagcaaaaactttataaccctgggtatttggcgatctaaataggttaaatagttttggtgtgtgtctgtgtgtgtgtgtgtgtgtgtgtgtgtgtgtgtgtgtgtgtgtgtgtgacagagtttcactcgttgcccaggctggagtgtagtggcacgatcttggctcactgcaacctcatcctcctgggttgaagcgattctcctgcctcagcctcccaagtagctggaattacaggcgctcaccaccacacccggctaatttttgtatgttttagtagagacggggtttcaccatgttggccaggttggtcttgaactcctgacctcaggtgatccacccacctcgttcccaaagtggtgggattacaggcgtgaaccacaacacccagccctataatattttttgtcgttgttgatgtaagcacatttttaggctctgtggcaccagagtgagacatgggaagtgggcctgaaaaaacctgggtcttgtttgtgtgtgtctggatagagaaacagatgaaaaaatgtatacatatcttattggtagtatatgccaagtcaatttacaagtatcttattaaaatagttaatgaggccaggtgcagtggctcatgcctgtaatcccagcactttgggaggctgaggcaggcggatcacttgaagtcaggagttcgagactagcctgtccaacatggcaaaaccctgtctctactaaaaatacagtaattagccgggcgtggtgttgggtgcctgtaatcccagctactcaggagggtgaggcaggagaatcacttgaacccaggaggcagaggttgcagtgagccaagattgtgacattgcactccagcctgggtgacagagtgagactctgtctcaaaaaaaaaaaaaaaaaaaatctacttttgaccttgaagtctgtattttcttcctcacgaggtcaaattttcctgactatagtttcacctacagtttgaaaactgttctatttgtgacattatgctttgattcttgaaagtgagagaaaataagttattctaacatttttgtataggaagttgtcacatcatgacactcacagaatgagaaatctgcccatatttcttgataatcagactgtaaacatggcaggcctcattttggctgcttcatcttagatggctgtgaagaggagcttagaaatggaatgaagcatttcagcagtgctccgagcaggtttgcgtgtagaggagcaagatcccttacagaggaggaactagtaacacaggaggtgaagggggatgagtgagggactgaagagcttaggaaggtgggagaggagttgggatcaagaccagggttggggcacacttttgaaagcagcagaaatccttgttattgtaatctttagacacctgtgtgtaaattttggtgttgaaatcatgagagagagagaaaaagaaaaaagaaattctgagagagttttaatctgactgcaaaagcaaggatggaagaaagttttcaaaacataggttcatgagagatagttttcactgtgttttttgtttttttgtttgtttaaattggtacattttgccgggtgctgtcgcctataatcccagcactttgggaggctaaggcgggtggatcacgagatcaagagattgagaccatcctggccaacatggtgaaattccgtctctactaaaaatacaaaaattagctgggcgtggtggtgtgtgcctgtaatcccagctactcaggaggctgaggcaggagaatggcttgaacccgggaggtggaggctgcagtgagctgagatcgccctactgcactccagcctggaaacagaacaagactctgtctcaaaaaaaaaaaaaaaaaaaaccagtacatttcactgactgaaatattgcaaatcagtatcttcttacttacagaagtgagtagtaggaaacactactgcaaacttttgtcaaaggatatttatcctttgagccaaagcaccctgttttcatagttctgcttcctaatgtggttttctgagacctgtttgatcatttcctttttaactagaaatctaacaaagtctgcaaattacttgggatcagaaggatggctataattgagatttaaaaagtaaactcaattacaaagaattgtttggaatgtaaacttgagccttactgtcacctattggcggtcgtggttttgaagatgacccctctggagctggatgaaatttaaaactagaatcaggctcagttcagtcacctggacagacatttattgagcacctattgtgaaccagcaactatgcagaggatagaaacctgaataagaagcaatctttggccgggtgcggtggctcacgcctgtaatcccagcactttggggaggccaaagccggtggatcacctgaggtcaggaattcgagaccagcctggccaacataatgaaaccccgtctctactaaaaatacaaaaaaattagccaggcatggtggcgggtgcctgtaatcccagctacacaggaggctgaggcaggagaatcacttgaatccagaaggcagatgttgcagtgagccaagatagtgccattgcactccagcctgggcaacaagagtgaaactgtctcaaaaaataaaaaaatttaaaaaaagaaacaatccttgacatttatttatgatccatagttatttttgtaattgagtatcttcaggaataaaaaatactaatatcttttggggccccctctttaccctaaagccaagtataaaaggtcttattaagcatcgacttttaggattctgggagctctagaaatgtaccatataattgcagggcagcatgacattatactacaaggactggcggatctgtgacactggccttcagggaaagagacgcaagagtcatagttactgacctgctactactaaccggctgtgtacttggagcaagattctgttttctgtaacttacgatgggactgcaccatctgtcagctcactctgtaagccttaggtactttaattatcacaagatagttgcaaatacagtatgcaattgaaagctaatctctcagcagtgccctctggtctcaccccctgctcctagagccgggactctgggcatgaatcgatgccaccactgctggccggagcagctcactccatagcacttctttttttttttttttttttttttttttgagacgaagtgttgctgtgttgcccaggctggagtgcagtggtaccacctcagctcactgcaacctccacctcctgggttcaggtgattctcctgcctcagactcccaagtagctgggactacaggcacacgccaccatgcccagctaatttttgtatttttagtagagatggggtttcaccatgttggccaggctgatcacaaactcctgacctcaagtgatccgcccacctcagcctcccaaagtgctgggattacaggcatgagccaccgcacctggcctccatagcacttatgaaactgatctgtgcatccttctctcttcccattcattattcaccatctttccttccaccctgtttattcaacatcctgtgtcatttctacattagcctctgctttttcactttcttaacacggcacacaaaatcctgtgtggcctgcccctcctcccctctccagcctcattttataccaccccgtgttcttgctgcagccttactggccatctctgagttctttcccatctcaggtcctctgcccaaactgttgcctcttcaaggatcgcacctccccaccccttaaaacacatttatgcctagtgttccattattggaacgctaagcatgtgggagttgtatcctactgctgaaggtcatcgccaaggtctgattgcaaaatttcaaaaaattgcaacctcaggcataaatgagggttaatcatgattcacatttcagcttaaaattgcttatttgaaagaaagactggctgagttgcttctgttatttgccccctccaccccagattcttctaaacatgatgcaccctgctcattatgtatttacttagttatgactaaaactgtctcccttctcattagattctaagagccaaagagtagaaactggtctattttgtttagcactttttctccaatgccacgcactgcctggcactggtaggtgctcagtaaatatttgctaactgacttttttatgtcctttgaggcaagtgattatcatcatgtaatgacatctatcattataatatcaaattaatttatgcttcttcctaacagtgtttggtttgtaggaggtacccagtgaaaacttataaacaaataaataacaaaattctaggatatatctatttccaacaaaattggaatctttatcttaaatagaccttgaggccaggcgaggtggctcatacctgtaatcccagcactttgggaggctgaggcaggcggatcacctgaggttgggagtccgagactagcctgaccaacatggagaaaccctgtctctactaaaaatacaaaattagccgggcgtgatggcgcatgcctgtaatcccagctactcaggaggctgaggcaagagaatcacttgaacctgggaggtggaggttttggtgagctgagatcacgccattgcactccagcctgggcaacaatagcaaaagtctgtctcaaaacaaaagaaaacaaaacaaaccttgaattaaactagttatcttcaataatttacttaccttttactttaaaatacttaaaaaaaaagcctatttaggaatattgccaaggccaactggattaacaacatcatttaaatattcagaactcattctttgttatgacaactgtgttcacacagatttttaatgttttacccctaccttgcacttcctttttgggtaaatacatttttttttttttttgtgacagtcttgctctgtagaccaggctggatgcagtggcacagtctcagctcattgcaacttccacaacttgggttcaagtgattctcgtgcctcagcctcccaagtagctggaattacaggcaggcaccaccacacccagctaattttttttgtattcttttagtagagacagggtctcaccatgttggccaggcttgtctcgaactcctgacctcaggtgatccacctccctcagcctcccaaagtgctgggattacaggcatgagccactgtgcctggcctaaagatgttttaatatgagtaattgccaccaagtgcatctttatggttaggtagttgccttttttttttttcttttgaaatggagtctcactctgttgcccaggctagagtgcagtggtgcgatctcgggctcaccacaacctctgcctcccaggttcaagcgattctcctgtctcatgcctggctaatttttgtgtttttagtagagatggggtttcactatgttggccaagctggtctcaaactcctgacctcgtgatccgcccgcctcggcctcccaaagtgctgggattacaggcatgagccaccgcacccagctggtagttgcctataatagttcgatttgtaggtgttttattagggaagttatatcctataaagaaagggaaattacttgcctgatgaagtgtttccttagagaactgataatgggtaacttttgaggtgcagtatttctggtttcaaaataagggatattattatatatctcatacatatgaaacctttctaaggaatccagctcgcggaaagcaaaagctcaactgcctggagacagttctgacttcctaaatcagtggagtcctcagtgatgatttctacactagataaagaaaactctccgtgaatgaccaaaaggcatagactgctcaagttcactctaatttaattatcagtgaaaagaaaacaagctcaagaagttttcagtctcttaagaacaggttgaaacaactccctttgaccactagtatcacggcccaaggctgaatggacatttcacagatttcagaaaatcataagtaatttaaactgttctttttccaagtacatttgcaatgacttctttctggcgcacaggggataaactgtttccattttactgtatctcatatacaaataagcgtttcaggtggagcttcatacctccgaacttcaaaggttttcctgagttcttagtcacgtgtctgttttccctgctacaccaagggttgggccaagaatatacgctcaaaacaagtgacatgaaaatgtcatgttgggtcgggtgtggtggcttacacctgtaatctcagcactttgggaggccaaggtgaacggatcacttgaggccaggagtttgagacagcctggccaacatggtgaaatcccctctctactaaaaatacaaaaattagccaagcatggtggtgggtgcctgtaatcccagctactcgggaggctgagacacaagaatcacttgaacctgggaggtggaggctgcagtgagccaagatcacaccatggcactccagcctggacgacagagagagaccctgtctcaaaacaaaacaaaacaaaacaaaaaaaacgtcgtgttgttgaagaaaaatttttgtgccatctcaatttttacaagacccttagcaagaacatcaagtgttattattatattgtagaaaatatcttctgcctataaagtacactgtcaacattccaggtggttgtgctaagggcttggtatcatgttagggttcatcagaaagcaagtatctgctacattttcacctagatttatttccattctcctgtccaaggtgtctctagtctttgtttgaatgtattacataagtttcctttaagtttatgatctgctctaacctttgaagtggttgttttgttcttctcaggtgtgaatcccaagaaggtgtccttgatagccagtggaaaggaaataaacccccacacttggagcaaccagttattccccaagtcactgggacccgttggggcagaacttgctttcaaaaggagcaatgcaggtaacgcaagaatacaaaatgtacatgtacggggttttcctttatagaggtctacttttaaatatattgcagtgctcttccaaccaagatacatgtgcacttgggagatacacaaaggttttccactacactctgcctatgggtagccctgctctgctggagcagtcatggagttgtaacactgcctcttcaataaaactgtttgtagctggatgagcatggtggttcacacctgtaatcccagcactttgggaggcggaggtgggcaggtcccttgagcctaggagttcgagatcaacctggccaacatggtggaactgtgcctctatattaaaaagtacaataataaaaaaaaggttttcccactaattcttgagtacagctagttttaagggaattctcgacctccatctgaatctttcctgaaatgggtctgccctagcaaggagtttctattctgaaaagaagacttctcactggctaccatggtgtgttttctttttccccaaaatgtaaaaatatctggggtgccaatgaaatggaaattctggtatgttgatgtcactgttgagaaagtaagtaactttgatttgatgactgaggaacaggtcctttttaaagtcaaggagtcttaacagttctcagcatttagaaaattgaaggaggacctacttgaattgttagctgacaggtaatttaaaaagtttttttaatttttttttatgagatcagtatatgaattttggtctgtaattttgaagagcgtttgaagaatagagtggcaaagctatcacaaaaccgcttttgttcccaactatctatttgtattagcaagatttcttaatgcttctgtctccaaaaaggaagaaaaaagaaaagagagagaaaatagccctgatgctgtgattccagcaataaatattcatttgttgatacatgaactacttgaaaataaccccacctttctcattaagagatgtgtttgcaaaaaacttaattttcgtgtttagtaatcaaaatatataatactcaacttttttgattaattatatacaatgaatcattgtaattataactttgtacagtatgttaatatccttatggttacaagaaattaaaaaaagttttaatttacacatattttagagtgaccaattttagacttttaagcctaagattacatttggataaaatttggaagctgaggtataaataaagatataattttaagggaaaaaagaattaatgtgaaatgtccaagcatcaaaaaggaacttgttcatgtatttttatgtcaatattggaggacataaaatcactaatagttttggccaggtgcagtggcccactcctgtaatcccagcactttgggaggccgaggtgggcgaatcacaaggtccggagttcgagacccgcctgaccaacatggtgaaaccctgtctctactaaaaatacacacacacaaaaaaaaatccaggcatggtggcatgcgcctataaatccagctgctcaggagactgagacaggagaatcgcttgaacccaggaagtggaggttgcagtgagccgagatcacaccactgcactccagcctgggcgacagagcgagattctgtctcaaaaaaaaaaaaaaaaaaatcactaatagttttattttttaaatgcctatagttacaatatgtcagaaataacatcctttgcaactgttaaacttatgattaaaaattttaaatatcaacttaaaagtgtgtgaagaggtacagtttgttttttaatgtaggtgatattggatcaaaaaactttgacaattaccattataagtgagtagtttagtgagatattctgatgtgacatcaatatatttgggctttttacaagttttccagattctttaaaaactcagtttatccatttaatgtcgctgcggtgtcatacactgcagcactgtaatttacttattttttcttcagataattaaaattaatattcactgaaccaaccagttacacaaattcaattaaatgacagtagaacaactttgagtctcaagggaatatacagttggcatcaaataaatgctgtgacaacaatggggacatttttgcatttttaagggctctttctggatcttttcattaatcatctaatccattttttctctgcttttcctataacattctccttactattattctttctttccatctgtcttctctttagaagaaagcataattaaaccaatcgaaaaactatcatgcaatgaaacttttcctgaaaaattagaggacccacaaggtaatttctgggcgtcagatgaatgcagtttgttctttgaatctcttgtctgattttcttctcaacatttgcccctaatcctgacataaaaggccgagatgatccgctttgagaagtcagatcaggactaagataaagaaaagcattctgtctcatcaagaatatcttccttcagtaactgagattttaagatgaatatgctctcaaaaagctctgtgctggtcttcttaaattaattacggaaatttatagaggaaatcaagcaaataattctaatgaaaagaatcaaaagagtattttctaattttgcgatctatattcctggaatttttttttcaaagttctgaaactcatttcttaagcatgaacaaccacttttttaaaaaggttaggctgggcgcggtggctcacacctgaaatcccagcacttcaggaggccgagccgggcagatcatgagatcaagagatagagaccatcctggccaacatgatgaaacccgtgtctctactaaaaatacaaaaattagctgtgtgtggtggcatgcacctgtaatcccagctactcaggaggctgaggcaggagaatcgcttgaacccgggaggcggaggttgcagtgaaccaagattgcgccactgcactccagcctggcaacagagcaagactccatctcaaataaataaataaaaattaaaaaaaaaaaaaggttaactgggttaatagagatggtggatttcctaggggttcagtgttactggtttcaacagtgctaacaactggctgcaatctgaaaattcacagcatacaaggtacttcaaataataagccaaaataatttaagaagacttaattttctgttcatgttttttccctaacaacttctttctccaataagaagcatcataatgcatgaatcctagagtctgatatatcccattttgtcactcaccagcttttgtggtttgggacaagttgtttaagccagctttcccgtccataaaacggacgaaatttccttaggtattcttacataaccctacctggaattttaacacatgctaagcatttaataagtgtttgctctgctgatgaggatgagagcaagagacatgactgaagctgctagtgaatgcaatcactgctttgaatttccttccgaaaatttttctgaagtaaagaactgattagtgtttcagaatgagtttctgagatgggaaaaaggttaaagtaggcagctgaacttacacaaaattcagtagggttaaacatgtatagactgagagcatgtgctcactgtatgtaaccctttaggggctgataacataatattgcgctttgacatttgttgcttcaagagcagacacctgttgaagcctgatatgccgtgagagacaacggacacagagcccagtgtcgagacgtgtaaacagataacgctatagagaaaacactgtttactgaacagtgctttgaaaccacgagggtgatcagagccccatttcgccttctagagataaacctgtctcccttcctgcagagctagctcctcctattgcttctggttgtcgtttgtcttcagtctgcttcctgccagtgcagcagctcctgctagatcttgacatcctagtggccagatcccaggggcggtgctggtcctatccgagctctctgcctcatctcccattccttttttccacactcagtgtgtattctcttggatttccataccctgttcctcctaccatccacctctctacctgttctcttcctccatgaggtccttttctctcctgtcccttaatgctggtgttccttgggggtctactccaggtctctgcacattcgcagtgcctctgagctggctccttcagcccacaactctgtaaccaccacaccctgatcatcaccaatctccacgcctgcccacttgccctctgcctgccacaacatgaatgtcctctgggtaccatgtctttcccccaatcctgattctcctcctatgttgctattcatggacaacgcaccccccagtcacctgagctgcaaacttaggagtttatatttccctctttccctaccacctccaccccgtgaacctgcttagttcccttcttcttcaccctctgccactgctgtggttcagaccctcatcctccctcatttcagctcttagcagtgacttcctcactggtctccagactttagatttttcctcatcaatgcatccctatgctaacgccagattgagcattcaccaatagtgatgatgatgatggtgttgataatgatggcaattatgctagctgacgtttaatgcgtacagattctatgccacgtgctctgaagagtctcatcaatccctacaacaaccctacgagaataggtccacttacaaccattttacagaatgaagacagacacagagagcacttcagagataggggcttcgcagtgggaaatacacccccatgtgaagaagtggggtcgtgagaaagcctggcgtgttcagggtgaactgaacacccctgggccttgagttcagaccccagctcagtctcttactaactgtgagaagttaggcaagttactcaacattggagagccacacgatatggatactaatatgatctaagcgggctgttgtatggatggaataagaatatctgtaacaagtgcagctcagtgcctaaaacatagtagatgctgaaaaatagtatttagaagtaatggggtagtattcaatgttattctactgtgcctaaaatattcaccttctgactgtgaaactttatgatatgtcactaggaaatcttggaagttatgctacttacaatcagtcaggatatattccttcctttctcaaaaaagaagtgcagtcagctggccagaggatccacttagcacctctcaatgcaacggcttcaggtaggaacaacttcagatacagttttctagattcctagcagaaaggaacattttcctttttaagtttatgcagtcacttttcccaagcgaagacttttagtcagcctcacctcattaacgcatttctttttgtttttaccgaaatgtcctatttttcttccaaaaatgaggatttgagggtctaataattataagagctaccactaattaagtggtgactctctgccaggcacagtgtaaagggcttactggaattatatcatttaatcctcatgataacctgatgatgtagctagatctcttctttacagatgatgaaatgtaggtgaagtaacttacctgaggtcacacagctagtggagctgggatagaaacccaacttaatccacttccaaagagtgtgctgtgctgcacagagagatgtgagaaaatgccttttccagagccctctgcccaggacctggcacagggtgaaagcttaataaatgctgacactctatttatgaatgagttaacatgaggtgtgtctctacagttccatcttagggcgtagaaattagcggtggcaggactttcacaccctgccttttgctttgcaatagtattcagggggaagggtttatccctccaccctccagcgttatgcctaactgaggtaagcttgctccccagtggtgtggcatgtgacagccacatgtgggggtacacacttgaaatggagggtgatgattctgtacttaagccaatcagatttgaccatgaatggtcttcgaatcatttgaatctgaaatagatattcttagtgaagcaccaaaaataaacattaaagccaatcattagaactttaataagatacctaattgtagtttaatttatttattttaattcttttttatagagaaaaagccttgctctgtcacccaggctggagtgcagggatgcaatcatggttcactgcagcctcgaactcctgggctcaagtgatcctcctgcctccgccttctgagtagatgggactacaggcacacacgaccgtgcccagctaattaaaaaaaatgttttttgtagggacagggtcttgctatgttgcccaagctggatcttgactcgtgggcgcaagcaatcctcccaccttggcctcccaaaactctgggattataggcatgaaccactatgcccggcctgtagtttaatttaaaagttgactctgaaagtgtgctcacagcctatcctaaccactatcttatattaaaacccctgattagatgtgccagtctttaaagttcacactattggagctaaaaatgtataaagcctggacttctttatttttttatttcttgccgcaatagaactgcttaaatagtactacagttaccttatctgtgaaaagaattgcttcattatcttttcgctgaaacaaaataagtaaacattttatatacagcagtgatttttataaggcctcaaatatttaagccagccttatgagccattcatttatatgaaatataaaattttatttattttgagatggagtcttgctctgttgcccaggctggagtgcagtggtgtgatctcagctcactgcaacctccacctcccgggttcaaacgattctcctgcctcagcctcccaagcagctgggattacaggcatgcaccaccatgcccagctaattttttttgtatttttagtagagacgcagtttcactgtgttggtcaggctggtcttgaactcgtgacctcaaatgattcacctgcctcagcctcccacaagtgctgggattacaggcatgaaccactgcacccggccacattttatatttttaatataaaggcagaaaatcataatgtttcaaattattttgttacctaggtatctactcttataaatcaagagtgggtcttttaaaaaatatttttgtaagatattgaaggcctttatatattaattattctatccaattagcatgcatattcctgttttcattttttttaagtaaatgctttttcttaactttttatttctttactctgcttatcagatttttctacagatggtgataggaggaaaggtaaaaaatgaagtaaatattaatcactctcaagtggtcaatgcaaatccttagaaaaaacactgttctgtaagagatgtgtcttccagtcatgccagttgggtgacagtttcccacaagaaaataaaaccaggtcattaccatatttactcaactatttcccccttcttgcatagtctcgtctttgctcttctttctccccttcaagatttttgtttttgtttttttttttttttttttttgagacaaagtctcgctctgtcaccagcctggagtgcagtggcgtgatctcagctccctgctgcaacctctgccacccgggttcaagcgattctcctgcctcagcctccggagtagctgggactacaggtgcgtgccaccacgcccagctaatttatgtatttttagtagagatggggcaggatgatctcgatctcttgacctcgtgatctgcctgcctcgacctctcaaagtgctgggattacaggcatgagccaccgcacctggcctctaccctttaagttttgagaaggaaaatcaatgtcttccctcccatgtaatctctccttcccctaatacttccttatcccctgccttgaaactaacaaggacttcgaggagtgacttctgttctacacagcaccctttaggatcactttagaagtgcaggatcctgttttaagcactctgtgtacattaactcattaatcctcccagggctgtattccaggaggtactattatgatccgcatctcacacaagttttatatgttgctaaaagttgtatcacagtggcatcaattaaatccataactagaggcaaacttctttcctttagcatagattttctacaagaagttaaatgtccttgataggacagatgcagtttttaaacacagagcaagcattgcaaggctcactatccctcccgctcttgcagggcagtgaggtgtggggtggtcccactaaggcacaaaagcacttcttgccctgccacgagatctgggctcctctcagctgttaggttcttcaccaaaggtacttgagtcctgaaattctagtatatctaggaaaggaatcctaaatctcaacactacccccttcttagcaaaatgattccctcttgaaaaagttttacaaaatattgtcctggacacaatttcatttaaaaccatttaggacttaggtgatatcatgacctggaaaaaggcttctctttttgttactccccaaagctctcacttcttgccctcagagccacacccattagcctaatgccacgttcccttttccctccctgaataagcggggcttattgcctctctccccgctctctactcccctcccacgctgtctcttctacccctgctaccagtttgacctgtggcccacatgggtgagctcactaatttagcagacagatgctcgtttctattccaatggctataactaaagggctctttctggaaaacatggtgccctgactggcccttgtagacacattgtccctgactttgttagatagctttttagtggctttgactttgagaattttaagcccagtaaaaagagtggaatgaaaggacctgtcaaaccatggagtggggagctcttggcctccctgcctccaccaaactacacggcagccaggcggctgtcttacccagagtgtccacacttaataccttgttcacccatgctgaagttagtagcttgtcaggaccacatgctcacagaattccctcctcactcccagttatacagtgaaaatttaagaaaaactgtgcaaaccatgccagtaaatatgggatagctagggctaggggtacaaaatggtcagattcatttcagtattaacacttagagtttaatccaagaatggcagctactacacagtgtgaagagatatttaaaccccagatggaaaaagcagacatccctcctcagatacaatacctgtgataccttagctctcaattcgaggtgaggaaagcgtgaaggagggactgaagaaggcatcaaaagttgtctgtaaaatgatctcctgctttgtcctttgaaatgttgaagcagttttagctcataaattgttcagataacaaatgttcaagaaattttaaatttttcacaaatttttaaacagtcagatatatgaatgaaacaaccttgtggttaaaagtttaggatcctaccatttaagggaattgtgttcccacccatgattttcccaatgagaaatgaagtatgggccgggtgcgatggctcacacctgtaatcctagcactttgggaggctgaggtgggtggatcattggcaaggctgaggtgggtggatcaccttaggtcaggagttccagaccagcctggccaacatggcaaaaccccatctctactaaaaatacaaaaactagctgggcgtggtggtgcgcccctgtaatcccagctgctcagaaggctgaggcaagagaatcacttgaacccgggaggtggaggttgcagtgagccgagatcgcaccattgcactccagcctgggcaacaagggcgaaactctgcctcattaaaaaaaaaaaaaaaaaaaaaaaaaaaaaaaaatcttcattctaaaacccacattttaatgtttaaaaagaaatctattataggaccccatgtgtgttcttccatgaagccacagttttatagattcacaattccaaatacatttttctgtagtgatattgtgtcaatattatttagatgtaaccacagtgtgatattacaaagtcaccaacactgtgggtgttgcccattgaatttgagccaataaattttcttggtcttcttacctggcgttgcctatctaaatgtaaaatattaaaaatagcagcagtgtcagcactataaaccaggaataatattggctcttcagctactgaaaattctttttttttttttttgagatggagtttcactcttgtcgcccaggctggtgtgcaatggtatgatctcggctcactgcaaccactgcctcccgggttcaagtgattctcttgcctcagcctcctgagtagctgggattacagtcacccgccaccacgctcagctgattttttttgtatttttagtagagacagggtttcaccatgttggccaggctggtctcgaactcctgacctcaggtgatccacttgcttcagcctcccaaagtgctaggactacaggcaggagccactgcgcccggccagctactggaaattctaatggatgtcaacataatactacactagaatttttggttttaacatttaaaaagcctcagagagtactgagttaatcttttaaacataaattcagattttccccatcaaatgagaggatgaatttctttattttgagtttgataagcaaatgagtaaaaccctgttttccaaatctgatttctttcagaatatacctggaacacaaaaactggtcgggggcagttttcaggacgtacttataatcctacagcaaaaaacctaaatattgtgaaccgtgcacagcccattccctcagtgcatgggaggacagactgggtggccaagtatggaggccaccggtaggagtctatggtgtgaaaccctacagcattgctccgtagagtacgtgcaagttccttgaccctgggaaatgtctacaaatgtctatttctactgagttctggaagaaatatgcaaaagtgggtacttggaagggcaaaaatcatcccctattttacttatttccaagaaatgcattttcttagcatcattgcccacagtgttgatatatgggtaggatgttacaaagtattgaataaactatttgccaaagtatgaagtatttgatctacaatttaataaatagtaaatccaataagaacccttaaaaaaaaacaacttccagaaaatgtttagagtgttttagttttcatttgttgtatgtgcccaaatggtttagtagttcttcactttgctgtggttggcttaagaggtttgtcttttgtttttgtacagcagttgggccaacctttgctggctgtcagctgtggttcttatttgactaaggctctgcgctgccattttgtcaatgacagaaagattgcaattatttgtttttctactttgaagctatgggagcgatggtaatttcaatcttgagcaggatatctttttttttttttttgaggcgatgtttcactcttgtgtccaggctggagtgcagtggcactatcttggcttactgcaacctccacctcctgggttcaagtgattctcctgcctcagcctcccgagtagctgggattagaggcgtgtgccaccatgcctggctaatttttgtagtattagtagagacagggtttcaccatgttggtcaggctcaggctggtctcaaactcctgacctcaggtgatccacctgcctcggcctcccaaagtgcagggcttacaggtgtgagccacagtgcccagctttttttttttttttttagaaataaatttatctttaacatagagaatatcaaagttatgccacttgattttagtggacggcttgtgttttgatcttgaccagtacagttcccatgaattcaaggtgacaatcaagcccaatggcttgatgacttcaatagtaaccaagtcaaggttctcttggctggacatcattaagaaagttctggaaactgtgtttgtttgatgctggttcattggacttttcaaattgttttgtttctgtgtccctaccagacacaaagatgaagtgtgccagctggttcccccaagccagctcatgctgctgaccactgactcagctctgaccttcacatttgctctgaagcaagtgcgttcagctgctggggcagtgatatcacatagtacatatattatttccttagtttatttccaaactggtattttaaatagacacttcgaactttgggctactctgtttaaatctgccactttctggactggaccttagtactgtaaattctttttaaagaataataatgttaccaactgctgagatttttatgtattttgtgactttgtaacaactgctattgtaataagtgtcatcttgtgggcattatacaaaggcatattataaaataataatgatatttttgtatagaagagtcaactgttcagatgtaagatgttgaaaaatgttaaaatctaaagagtaatttatcctagtggtaatggttatatgtatttgtacagtttaaattaatgtctcaaagctgtgcagtcttttgttactgggacacttttaaactctgaataggcattaaaaaaaatatggctaa

SEQ ID NO: 453 - DNA, 40471 bp, Homo sapiens
  source 1..40471: mol_type = genomic DNA; note = NC_000010.11:c97498794-97458324 MMS19 [organism=Homo sapiens] [GeneID=64210] [chromosome=10]
ggtgcccgcgccgccgccaccacccgccccaggtgcgcatgtgaccgacagcaccgccccctagggctgggcctgattttctcattggcttcccccgtggtgcgtaccgcccctctccccacccagccaggtgcccgccccgcagcccgtctcccggggagccgggctgggaattattcgccctcaatcgcctccggctgcgtgcccagcagccgccttccctctcggtgccaccgccccatttcaggccccgcccctccctggaactgcctaggcagaagccggcaggcacgtgaccccggcgccccgcccccttgcgcttccccggagattggctcgggaggcgcatgcgcggagagcccgtctcgagccaccgcccatatcccctcccacggtctctagttcgcgttatggccgctgccgcggctgtggaggcggcggcgcctatgggtgccctatggggcctcgtgcacgacttcgtcgtgggtcagcaagagggccccgctgaccaggtggctgcaggtacggcagacggcgccgcgcgccttccgcatgggggccaacaggagggagcggcctcagtacaggcgccgggcgggaagggaggagcggggtgactttgagagattggtctcaaggctggttagtgagcaccgcgaggttcagagccgtaacaagttagagagttgcctgtgtcttccttaaaaccatttacacttctcatctccctgtagccaattatagggaatcattacattttacagatgaggaaactgaggctcagcgagggcaagaggacttgcgcagggctgcagaccaggcaggagggggaggtgggactcggacccaggcgttcaggtccgaaccgggtgctcacgccacgaagccatgctgtttgtgggaggttgacgtgtggaggtgcatcctcgcagcgtccgctcccgtcgcgtggcatcctgggagtggcagatggccccgcgctctgactggctggaattaagaggagttgaggagacgggccaggaggagctggagatgttctgggtgtcctccttaagactttctctccgtttcttgctaaagttcttgattagtttgctccatgacgttttatgtggcgtttgtttttgtcttcttcccagacccccactttcctgcttttgaccagttcagagatctcttagttcagacagcttatctaaaattagaataaaacgatttccaggcttccgtggagttctgagactttgctcttctaggaaaaaaaaaaaactactaaaaagttattgaatgttaggaggccttcagatcttgggtttaagtaacaatataaaattatctaatgagtagtttttttaaaaaaactttggaaatttcgtatgcttggagagaagtaaggacacatttctcttggatattgagcgtattaacctttagaatatgtaagaaaagaatagtgaatctgctagaaatataatactttgttcgttagcagtattccactttaattcaatcatgccactattgttgaatacatattattccccaaacatgatgcaaagcaataggaatataaatacaaattaggttagatctgtgcccaccaggaacttatagtatgctgggagaggcaaccattctgtaagaggtgtgtgcagcgtagtttggaagcatcaaggagcaaatacctggtgctgccaccaaacttaacatcttacaattttatgaaatgtagtgtgttatcagtgtttacaatttacaagtacagtgtcttaccaatgtcattttccctcatattttattatgaaaattttcgaatatccagccaagtataaagaattttataaggagcacatcacttaggatctatcctaccattaacattttaatattacttgctttatcatatagctatccatccatttaaattgcagatacctgtacactttcctttaaatactttggcatgcatgtcattgactagagtttgttgacggtttattttgatgtaaaatggaatatataaacctttaagtgtacgttcactgattttgactaatgcatacacctatacaatccaaccccctacgaagatatagaacattactatatcagtgtcatttgtgatgagtctttcacatttatgcgatacgaaaacaataattttggatttttttttgattcagaacatattttgaaaagacatcttgaatgtcttatcttgaataaggacttatcttgaataaggactgcaaattcttctctttttttttttttttttttgagacaaggtccctctctgtctgccaggctggagtgcagtggtgaaatcatggctcactgtagcctcgacctatgctcaagcaatcctcctgcctcaagcctcccgaagtagctgggacaacagggagtgtgccactgcgctcggctaatttttgtattgtagtgacgaggtttcaccatgttgcctaggttggtctctaactccaggactgaagccatcctcccatctcagcttcccgaagtgctgggattacaggcatgagccactgggactgctaaattcttacaaacgtttttgcaaaatttatatttttgtttctttctgaaaaaaaatggtctaaactgttgcttaatttgaattcaactcaactgatttaagactgtaacactagccctgttgtaatttagccctcctaagaaaagaaagttggtggtgggcacagtggctcacgcctgtaatgccaacactttgagagaacaaggtaggcggattgcttgagcccaggagtttgagaccagcctggccaacatggtgaaaccccgctctactgaaaatacaaaaattagccaggcatggtggtgcatgcctgtaatcccagctactcaggaggctgaggctggagaatcgcttgagcctgggaggcagaggctgccgtgagcggagatcgcgcccctgcactccagcctgggcaacagagcgagactccgtctcaaaaaaacaaaaagaaaagaaagttggtacaaaggaatagtaacagataaaagttgaaaaggtttggtagggttggattgtgtataactttggattccaggcagagaaatttgaatgacctgttatctgtactaagagttgttgtagatccttgagccagggagccataaaatgaaaacaaatttgacaaggattaagttaatattgtcaatcttagatcacagccctagttagggttgttgaaggataacagagtgttgaagcgtttatagaataagatgtgctttctaatctttcagcctaaatcaagctttgttagcgctaaagggaccagctagcttcctgttcagtcactcagagtagcagcctgcaaatttaaatgcagaaggagcaccctttgatcacaaaagcagctgctgccacctttgttttgtacctgggttcctggtgaaagtgtcagctgtaaagaagctgcaggcgatgggagggaaataacctggcagcctaagggttaaaggcctcttgggcaagccttcaaagcctgccactacctggccccagcctttttttctcactgctccctggacgtttaattccaggcagccacctttattcgtagttccctgagtgctttccttcccaattcccttcactagctctgtgtaatcgaagttagacctgagagtcaaggcccagcttgagttccctacccctccccaagggtttcctgattaacccagccagacagcatctcatacgtcagaatctttgtagtacgcacttatttctcaaccactcatgtatttagtggactagtttagtagctgttgctgtatacatctccacatcctaccctcccagttgtaccaccagaatctcctgaaattggcatcagtaggtacacaataaaaactgcttgagtgaatgcaatgagaaatgttgaaggaagaatctgtggaatttgagttctaactagttattatagggcttgaaggagatagaggactctaagaagaccccaaggttttgaaccagaggatgaggaaaagaaatactttgtccaaaattaggacgagagctgattttcagagaatgtgatttttgaacacgttgaatttgcaggtgatggatataatttttttccttttagttatttggattttccttcatttcagtctttattgtattgtgtttttccatgtttgtgattccctaagaatacctctattccttaagtcaaagtattaaagaacagtaaaatacagtttagtgaaatatctgaggcattatcagcagaaagggcattttgagagcttgattggaacttagtcctgattgggatttttctctctcctgctccttctcatcctcccaccctacccgcttcccctcacttccctttggctgctagtccagattctcaagaggcttcaactccatcagacagagatctgtttgtgcattctgtgtcaatgatcacatgaatactcctttgacttctcagtgcccccacacaaactggtgccttgctaaggaaagtgtgggtagttaggaggtgctagtaggtccatttttaagagcaaatcttgaacgtgttggaaaatcttagaccctcctataaagggaaatgaacttacactgattttttccttgataccagcgaaaataccgttaggaaaattaactctctgttagctttcttcatcccaggagtccaagtgcataattaatagtatttccaggtattacgggtgtgttgttgttgttgtttgtttgtttgcttttgagatggagttttgctctgttgcccaggctggagtgcaatggtgcgatctctgctgaccgtaacctctgccccccaggttcaagtgattctcctgcctcagcctcccgagtagctgggatcacaagcatgcatcaccacacacggctaattttgtatttttagtagagatggggtttctccatgttggtcaggcaagtctctaaacttccgacctcaggtgatctgcctgccttggcctcccaaagtgctgagattacaggtgtgaaccaccatgccaaccctggttatttttaattttggataatttgcaccattaaaagaattaatcacttaaagttagtggcccatggtccataaacccaggaattttacttctttctcatgccaacccaatctctgtttatatcactgtggtaacacagaacttgttacactgtgattgttttatttatttattttagaagcagggtccactctgttgccccagctggagtgcagtgtgacctcgaagaacttctgggctcaagtgatcctctggcctcagcctccagagtagctgagactacaggcccgtgccaccacacctggctaatttttttgtagcgaacagggccttgttttgttgcccaaggtggtctccaactcctgacctctagcgatcctctagcctcagcctactgtgattgttttaaatgtctttctgggctaggcatggtggttcatgcctgtaatcccagcactttgggaggctgaggtgggaggattgcttgggcccaagaattcgaaaccagcctgtacagtatagtgagaccttgtctctacaaaaatctttaaaaatcagcccagcatggtggtgtgcctgtagtcgcagccacttgggaggctgaggtaggagaatcacttgaaccctggagggagaggttacattgagccaaagatggcaccactgcactccagcctgggtgacagagcaagactctgtctcaaaaatgaataaatgaatgaatgtttgtctttctgctccaacagactatggacttccccaaaactccctgcccatatttctatcttaagccctaacatggtaccctatttataatattcagtaaatgttgaatgaaaacgaacatatggcttttttttttttttttttgggagatgaagtcttgctctgttgcccaggctggtgtgcagtggcgcgatcttggctcactgcaactttagcctcctgggttcaaatgactcttctgcctcagcctccgaaacagctaggattacaggcccatgccatcatggacagctaatttttctatttttttttttttttagtagaaacagggtttcatcatgttggccaggctggtctcaaactcctaacctcaagtaatccacctgcctcggcctcccaaagtgcaaggattacaggtgtgagccaccatgcctggccaccatcttccttacttttttttacggtcttgtaatagctttattatctcatttttctctaattttttctttcttttcttttcttttttttttgagacagagtctcactcagtcgcccaggtgggagtgcagtggctccgtctccactcactgcaagctctgcctcctgggatcacaccattctcctacctcagcctcccaagtagctgggactacaggcgcccgccaccacgcccagctaatatttttgtatttttttttagtagagacagggtttcactgtgttaaccaggatggtctcaatctcctgacctcgtgatccgcccgcctcggcctcccaaagtgctgggattacaggcgtgaaccaccgcgcccggcctcatttttctctaattttttctacttttatacttttttttttttttttttttagattgagtttcactctgtagcccaggctggagtgcaatggcatgatctcagctcattgcaaactctgcctcccaggttcaggtgattctcctgcctcagccttcggagtagctaggattacaggcatgcgctaccacacccggctagtttttgtgttagtagagacaggtttttgccacgttggccagactggtctcaaactcctgacctgaggtgatccacccacctcggcctcccagagtactaggattactggcatgagccaccgtgcccggccttatagtcacttttatgtttgtgctgcattaattcaagaattttgtgaaagctatatgaagactaaagggctttgccaggagagttcacccacatactgggattcaaggaaccacatgcaaatggctatttatttgtaattataaagcagccattttcatattaatgtatgcagaatgccaaagaagcatttttctttttttttctttgagacggagtctcgctctatcgcccaggcgtgatttcggctcactgcaacctctgcctcccaggttcaagcaattcttctgcctcagtctcctgagtagctgggactacaggcgcatgccactacacccagctaattttttaatttttggtagagatggggtttcaccatattggccagactggtctcgatctcctgacctcatgatccacccacctcgtcctcccagagtgctgggattataggcgtgagccaccacgcccggcctttacctcaatttttttaaaaaaatgaaaaaatagaaggtactgaatgggccctatttggcacttcttgtcttagagccttcgttccaaatatagaccctagcctgacatccacagagggttttgatggtattgctgaagaaaaatgattcagttcattgatatcctttgctattaacagttgttagtcccctatggcttcatctgtacaattattaactccttctgtgcccattattgaaattagtttttagatgggttgtttcagcagagttttctgtactatagccaggctgttccaagaaagtacccttttctaccttcccaaatgttgcaatgcccttttgtggttcgtaacccagaaataggtgtttcagttcatgtaagtgttgccattaaggaattgggtatagaacccaacttggtttgtttggcctgttagtctggctgctaccccttcccccacccttacagtctgctcattttttcccttggctctttctcaggagctggggcagcagctgggccttccacatcctggcacaagtgggctaagagtgcctgatgtctaaattggtgccagtcacgagctataagtcctaactagagctctcattttcctcagtctcattggacgacttcttactgtggtgctagagtgagcctctgcccaggtcagctcataactgttgctgtgagaccacagactttaggagaactggaagtttaggatttcttcagacctctctttcactttttccagcattggcacaagctgactagttaaggttctgcatttagaggtaggtggattaggaacccagaacaggctgctggaagtaattctctggttgtcacaccttatttagctataagtgttcaatgtgaaccaaagccttatgaagattgttagccttttaccctgtttctcccttgaaaatacattctaagatgcttctcttcaatatatgtgagttactattgtgctgctaaaattgcatttaaaggccaggtgcagtggctcacatctgtagtcccagcactttgagaggtcaaggtgggtggatcacttgagcccaggaatttgagaccagcctgggcaacatggcaaaaccctgtccctacaaaaaaatacaaaaattaggcgggcatggtggtgcatgcctgtagtcccagctactcgggaggctgaggtgagaggatcacttgagcctgggaagtcgaggctgcagtgagccatgattgtactactgcacagagctagaccctgcctcaaaaaaaaaatccaaataatataggtagatactcctccctccaggaggtggagtttaatcttcccctccccactgaatgtgagctggacttaatgaataccttacaaataaaagagtaccagaaagagaaaagtagtaactatagtgcagagacctggcagacataccttaaccaagtgataaacattaacattgccagtgatggagaagccatgttactatcttatatccctgatatgatatgttgagaagggtacttcacctctgtgatattcttttttaaaacccataaccccagtctaaacatgagggaaacatcaaacaaatgcaaattggggaaccttctataaagtacttctttaaaactatcaaggtcatgaaaaacaaggaaagactaagaaactttcacagaccaggagagactaagaattcaagatgactaactgcaatttggtattcttaattggatcctggaacagaaatttggcattagtggagaaactattgaaatctgaataaagcctagagtttagttaatagtgtgtatcagtgctaacctaatctcttagttttgacactcgtacatagtttcacagatgtgtgccatgtaagacgttaacattaagagaaaccgagtgatggctatacgggaactccgcactgtcattgcaactttgctataaatgtaaaattattccaaaatgaaatatttcttttaaaacaatagtctacctctcaacccttaactatgcattttccctccctgaaggcaacaaatgttattagttccttttatatcttccagagatgtaaataaatgcaaataaaaacaatcccccctccctttaaaaacaatgctacgcacatattatatacactgtttatacacactgttattttagatcttgactcattatcagtatatatgtagcttcagtctttcttcatttgtctttttaaaagtagctacaggcccggtgtgttggctcatgtctgtaatctcagcactttgggaggccaaggcaggcggatcacttgagctcaggagttcgagaccagccataggcaacatggcaaaagccccatctctactaaaaatacaatccagcctgggcaacagagcaggatgctgtctcaaaaaataaaaataaaaaagattaaaaaataaataaaagtagctacagagaattccattgtatggatgtactataattcatttaactggtttcttattgatgggcatgtgttgtttgcagtcatttactgttacgaataatgctgtattgaataacgttatacatgcattattttgcactttcacagtacagttagccctccatatctgtgtgttctgcatccttgattcaagcaactgcaggtcaaaagtatttgggggaaaaaatagcaactgtaccaaacatgtatagacttttttcctgtcattattcactaaacaatacaatgtaacaactatttgcgtagcacttagattgtattaagtattatgagtaatctagagatgatttaaagtatacaggagagtgtccatagtttgtatgcaaatactcttaccattttatataagggtcttgagcatccacagattttagtatcctcaggaggtcctggagccagtctctcatgtatataccaaaagatgactagatagctagaggataaacttctagctttcctgggttaaagcctatatgtacctggaattctaaagatgttatattgccctcaatatagggttgcaccagtttataatcctacctacaatgtttaagaatgtctgtttctgaatatcatgaccaaacataatatattgctaagttttttgtctttgccagtctgttagattttcttaaaaagtttctgtgtagtttaatttacatcttttattgtaaatatggttgagcaccttttcgtacatacttgtagttccttttatgtggaatgcctgttcatttttttgtttttgcccattttgtttttttaattttatttatttatttattttgagacagatcgtcactctgtcacccaggctggagtgcagtggcacgatctcggctcactgcaacctctgcctcccggaatcaagtgattcttgtccctcagcctcccgagtagctgggatttacaggcatgcgccaccacacacatgttttgccatgttggctaggctggtctcaaactcctggcctcaagcaatctacctgccttggcctcccaaagtgttgggattacaggcatgagccactgtgcccagcctgtttttgcccattttaaattgttgcccttttctgcattgatttgtgggaactctttatatatcgggaaactggccttttgttataagacttgtaattttttttcccagtttgtcctatgatcattatttttgccttgtagaaaatctgactttttaaaaccaatcttttagggcttctgaatgttatcttgttcttagaaattttctcatatttaggccaggcgcggtggctcacgcctgtaatcccagcactttgggaggccaaggccagcagatcatgaggtcaggagatcgagaccatcctggctaacacggtgaaaccccatctctactaaaaatacaaaaaaattagccgggtgtggtggtgggcgcctgtagtcccagctactcaggaggctgaggcaggagaatggcatgaacccgggaggcggagcttgcagtgagccgagatcgcgccaccgcactctggcctgggcgaaagagcgagattctgtctcaaaaaaaaaaaaaaaaaagaaattttctcatatttaaaaaacatattttggtgaaagatttaaagccaatgtttttgtttgttttccaaattggttccaggacaatcattctaacactattgaatagtctttatttttcccattaactgaaataggattttaaaaatcatattctcatatgtatttgtgtctctggactttccattctatttttgcaccactgatttctttgaatatgaattgaaactgcactggttgttttttatttttattatggaaaattacaagtatattcaaaagtgtatactttttatttttcttttttttgttgaaagtgtacacttttaaaatgtgaccatataataatctcttaatatctggaagggctaccttctccctgattttctattactccttttcacaacttgcctgtcttaattttatatatatatatatatatatatatatatatatggcactttaatttcaggataagcttatctagtttccaaaagtattctgttagtgtttttatggcgattatcttaaaattacagattgatttgggaaatttgtcatcttgagtctttcaaagatatgagatgcctttctataaagtttccttttcagatcttcattagtgcttgttttaaaaaacgcttttaccaatttctccccattttcttctgtactttgcagccaccattctactctctgcttttgtgaattaaacttttttagattctccatataagtgagatcataggatactgtatttgtctttctcttctggcttacttcacttagcaagatgttcacccaggttcatttgtgttgtcccaagtggcaggattttggcctggcacagtggctcacgcctgcaatcccagcactttcagaggttgaagtgggcggatcacctgaggtcagtagttcaagaccagcctggccaacatggcgaaaccccatctctactaaaaaataaaaattagccaggcatggtggcatgcgcctgtaatcccagctacttgggtggctgagacaggagaattgcttgaaacagagaagtggaggttgcagtgagctgggatcacaccactgcactccagcctgggtgacagagagaccctgtctcagaaaaaaacaaacaaacaaaaaacaccaagtggtaagatttctttctttcttatagctgaatagtattctgttgtatatgtgtacacacacgtcacattttctttattgatttatctgttgacacttaggttgctaccagatcttggctactgtgaataatgctgcagtgaacatgggagtacagacatctctacagatactgatttcatttcctttggatatgtacctagtagtgggattgttgggtcatatagtagttctatttttaattttttaagaaacctccatgctgttttccataatggctgtactaatttacattcccaccaacagtgtacaaaggttaccttttctctctctcttcaccagcacttgttatctcttgtctttttgataatagccatcctagcaggtatgaagtgatatctcactagtgctttaaaattttcatcgtctaggtgcggtggcttatgcctgtaatcccagcaatttgggaggcagaggcgggtggatcacctgaggtcaggagttcaacaccagcctggccaacattgtaaagccctatctctactaaaaatacaaaaattagggccaggtgcagtggctcatgcctgtaatcccagcactttgggaggccaaggcgggcggatcacgaggtcaggagttcaaaaccagcctggccaacatggcaaaaccccatctctactgaaaatacaaaaattagccaggcgtggtggtgggcacctgtaatcccagctacttgggagactgaggcagaagaattgcttgaacccgggaggcggaggttgcagtgagccaagatcataccattgcactccagcctgggtaacgagagcaagactccatctcaaaaaaagaagaaaaagaaaagaaaatacaaaaattagccaggcgtggtggcaggcacctgtaattccaggtactcgggaggctgaggcaggagaatcgcttgaacccaggaggtggaggttgcagcaagccgagatcacaccattgcactctagcctgggtgacaaaggcgaactccatctcaaaaataaataaataaataaaataaagttttcatcattcagattttcacattttttattaagtttatgtctaggtcgcacgcagtggctcacatctgtaatcccagcactttgggagactgagatgggaggatcatttgagcccatgagttcaagaccagcaacatggtgaaacccatctctacaaagaaatacaaaatacttagccaggggtagtggcacatgcctttggtcccagctactggggaggctgaggtgggaggatcacctgagcctgggaggctgtgattataccactgcactccagggttcaagtgattctcctgcctcagccttctgagtagctgggaccacaggcacatgccaccacgcctggctaattttttgtatttttaatagagacagggtttcaccgtgttagccaggatggtctcgatctcctgacctcgtgatctgcccacctcgcctcccaaagtgctgggattacagacatgagccaccacacccggccaaaacaaaagtttttatgtagtgtattttaccatgatttttaaaaatgagtgaaaaagtttatatccaggtatttttttggtttttcttttttcgctattataaacagggtctttttccttatatcattttacaggctattgtgtatatgtatatatatgaaggttttaaatttcataatattttgtatccagctaatttaacaaattattttgtttgtgatttttttatttctcttggattttcaggatatacgctcatgtcattcacaaatgatatatttattttcttttcaatttttatacaaagctgcatatttgaagtgttacagcaatgctgcttctcatctaggagggctcttggcaaatatagtgggcccccaggtacaaagcctagggcaggcaggaaacattataattagtgttattcaaccctttggtaggttttttttttatttttcatatttatttattttatttcctgcagatgtgaaatctggcaactatacagtgttacaagttgtggaagcccttgggtaagagcctctgctatagaatgttcttctccaaccctgactgtgtattctgaaaagttacttttgcgcattgctgctttcctggagcctgaatttgtcttgtagcccagcagcccccttccatattagtacctcagtctaagcctatatgtttgaattgtttctcctgaaaaaagtttcatgctgtctggctgaggcttctttagtatttgggagcacacagcctgtaggccacatcaactcctggcacagcccatggctttgggatgaggtacgtggttgaaggccatcagctgttgttgattcctttgtgcatctgtagacccacctacctccatgggatgctagcctgcctagacctgactcagaacaagctgtgggccctgtgtggggagttcccaggaggctgaccctgctgcagatccctactaggaggaaaggctttgggaaacagctgataaagcagtgttacagcttgggattctaagcacttagaggaagtacgtgcttgtagtctaatgcctactttcctcgtatttcataattggtatagaccatttaaattgacaagtcttattagtaagagttgttaattgtgacagcatgtcttctaaaacagaaaactagaaaactgggggaaattaaaaaacaaagtcactgttacacatttctcccacataacagactatttgacctttctgctcacattgtggtggccttggtccattaaaaaaaatatatacagtattggctgggtgcagtggctcatacctgtgatcccagcactttgagaggccgaagaaggtggattgcctgagctcaggagtttaagaccagcctgggcaacaaggtgaaaccctgtctctaccaaaaatacaaaaaattagctaggcgtggtggcatgcgcctgtggtcccagctacccggaaggctgaggtgggaggatcactggagtctgggaggtggaggttgtggtaaacaggtcatgccactgcattccaacccaggtgacagagtgagacccccatcaaaaaatatatataggccaggtgcggtggctcatgcctgtaatcccagcagtttgggaggccgaggtgggcggatcatgaggtcaggagatcgagaccatcctggctagcacggtgaaaccccatctctactaaaaatacaaaaaattagccgggcatggtggcgggcgcctgtagttccagctacttgggaggctgaggtaggaggatggggtgaacccgcgaggcggagcttgcagtgagctgagattacgccactgcactccagcctgggtgacagagtgagagtccatctcaaaaaatatatgtgtgtgtgtgtgtgtgtgtgtgtgtgtgtatatatatacacacacacacacacacacacagccttattgatgtatgattcacatatcataaagttcaccattttaaaatgtacaattctgtggcttgtaaaagtatatttacagatttgtgcaattctcagcacagtcattttgaggacattttcattactccagaaagaaacccatgcccattagcagtcatttccccttccctcttcttcccaacccccagcaatcactaatctactttctgtcttctatggctttgcctactctggaaatgtcatataaatggaatcacacacgtgacctttgttgccagcttctttcacttagcatgtttttggggttcatccatgttgcagcacacatcagttctgcatttcttttcttgctgaataatattcccgttttatggatatgcatattatttaatcatttatcagtggacggacatctggattgtttccactttttggctattcctaataatgctgctatgagcatttgtgtgccttgttccatttttaaatgctccaaatgcataattttctttttttctttttctttgagacagggtctcactctgttaatcgagctagagtgcagtggagcgatcatggcccactgcagcctcgatctcctgggcccaagccatccacccacctcagcctcccaagtagctgggactacaggcttgtgccaccatgcccagctaagtttttgtattttttgtagagacagggtcccactatgttgcccaggctggtcacgactgccgggctcaagtgatcctctcgtctgtctcccaaaattctgggattacaggtgtgagccaccacacccaacctgaatgcacagttttctacttcctgagtagaaacctttctacaggtttttatcctggggatcctgttaagagtgaccttatttttttccccttactctgagttatatacactcttacccttgaggttcaatacaactgtcatggccagaactcttccactttctgcttgttgctgcttagattatttctagtatgtttcagtataatctccgtagagcaattttgaggataagtcacttccttgttgcttcagtccagcttctcctatatcaataatcctacctagttaactagttaaagctatattctggccctcttactttgtaaccttccagttataaagttttggtttttcatgttttcttttactctaggaacttggtggtgattctgagcaattttttttccttagcattaatttacagaaatacacgtattctccttgttttggtggaagctgcagctgccaatcatctctcaaaccctgtgggtagctgctaagctgtatttcagaggaatgtcacaatcataccactggggagaaagagtaagcacagtgcttattaggtgccaaactggggtacctggaggcagaaacctctgttggctcttggtgtcacgtgtgcctctaaatgatgccacttcagtctgaggatcgctcttaagccttctgtccttactggtatctgtaatgccgttacctcaggaacaccttcctgggctgtttttactcttaacagggcttggctctgcttccatgcccagggggtgagtgtgactaatgtaaaatgtttatttcttcaaacatttgaactgggtaattgcaggttctctctatcctgttttcccctaggtcctctctagagaatccagaaccccgaactcgggcacgagcaatccagcttttgtcacaggtgctactccactgtcacaccttgctcctggagaaggaaggtactggtgtcactaataggaatgtcttcctggattgctgagcccaggtctcccatgtctattcaagccaactttacaggcagggagggagggcttaaagtatctatgaactactaattcaaggtcttcattcctcactggtatatgtggcagagatgattagaattgagacacaagacacatggatttcaatataaaacgttagctgggcatggtgttgggcgcctgcagctacttgggtggctgaggcaggaatcgcttgaacccaggagatggaagttgcagtgagccgagatcacgccactgaactccagcctggatgacagagcgggactccatctcaaaaaagaaagacacatggatttcaaatgtagccttagactgttttttcagtgtatttttcccactccgtaaaatgaacagagcagtatttcataggtaaagatgaaaagtaatgaaatatcggcatgctttgaggtcctgagggggaaaaaggacaacaacttatttatcttgtatagcaggggtaggcaaactatagcctggtttttttgttttgttttttttgtttttttggttttaaggagcagagagtttaataggcaagaaggaagggaggaggaagaagctcccctgtacagagacagagcggggctccaaagccaagagagggaactccgcctgccacagataccagctaggtaatatatccagaagctggaggaggcggtgtctgatttgcatagggctcgggggattggtttgactaggcatgtcattcacatagccggcaaaaaagctggccctcctacccgagccttttaatatgcaaatgcagggcaccatgatattctacacatgtggggatacatgggggcagccatgttgccaggaaggtggggaaagggcaggaacgccatgggaatcgccatatttgggtggacccagtttctaatggatttcatttgcatatcaaaggttgcggcctggcactaagagccagggctttacaggaaacttttctggagatgcttttaaaaacaaaaacttcccaaggaccccttttcctctctatttgcctaaaataatttctttcttttttttttttcttaactgttcaaggtttattgggggttttagttggtataacacttggatagttggttgcattgtttatatgtagatgtttttacattatatggtaatgtacactactgatatagttcacaaaataagatcctttggaagaattatgcacaagacatatgatattagatttatacactggatcccaggatgtgactgattgggaaaaaatgttggactaggcatgttcagtgaaggagccaggaagttatataacacacagtaaacatccacctggctcaaggggcaaatgcagcacgtaataatttcttaataactcctacaacattcccccctgtagagatgccacactaactgctgttacggggtttggggtgatgactcctggctacttcctactgaaaaggggcgtcgaatggggaacagcagcaagggctcctcctggggttgatctaagggtcctcacaagaatggcgtgtcaatgtgaggttcagtttacagtaccatttggagtttgattgcttcagtctgatgaacgaatttcctttcccagccaacacaccaaaatgatacggctccaatgagtggaggaacaccagggttcttggtcctcatgctggtttagataaaacgacaccgacacacatgaagtggttttaagtagcggagagtttaataggcaagaaggggcaagaaggaagggagaaggaagaatcttccctgtatagaggcagagggagggagggctccaaagccaagagagggaaccccttttatttgttttttggagacagggtctcactgtgttgctcagggtggccttaaacctctgggcttaaatgatcgtcccacctcagcctccctataggcaagcaccacatgcccaacctacagcctgtttgggggtatatgtgtgtgggtatttgtgtttagtataatatcatctatataaatttaaaaatagatacacagaaaaaataatttatgtcacacattaaaaaaaacacatcatacacctgtttttataaacttttattggaacatagctacactcatttatttccctgttgtctatgctacttttttgttaaaacagcagagttgagtagttgggatagagaccataccctgtaagcctatatttactgtctgaccctttaggaaaaaatttgtgaactctagttctgtagaaaggcagttttgggctgagaatgggttttactgtggacctgtatgagaatggatattaagaaatgttcccctattttcccgactgatcaggtgtctaccttcaaatgggaaggcacaggacatgtctcttggtgaaagagaaaatttgtagtggaacccaaacagaaacaactgttatagacttagggaaggaacaaagctcttgggcccttctcgtgcctatgtcaactaatggctgaatctggtttgtgcagtggtacacctgatactgttctatgagaaccggctgaaggaccatcatcttgtgatcccatctgtcctgcagggtttgaaggcacttgtgagttttccttcatttcattacataactttgttcaagggagcccttgtctagttctctccttgcgctttgggtgtgatggttcacatgctgaggagcaggtgcccaagtgtgggactaaattagtgttaccagctctacttccgttttccctctagagagtaaaagtgtactttgggggactggaaaccagagccatctggaaagagctgcagagaactcatcagcttgagaaagagtctcactattagtgcttcttcctcaaccaggatgctgtgattcttacagtagctaattaggcctgtcgtagggttgtgtcttggaggccatgctgcaattccttcggtattcacgtaccttctcctctcccccagagcctgtgtgtggccctgcccccagggctggctgtttctgtgcttaaagccatcttccaggaagtgcatgtacaggtgagggataacagtcatgttggtattctcctctgtctctaccccttgacataactgggattcaatagcaaaaattattgccttctaagttctgaattcttttggatcttgtgaatgtttttatgctcttcttcagtatgtttatatgctcatctttgttattggacaaggaaaggggtgcatgccattagatctgacctgtgtcctcttatacctacagaaagtaaggcatccctctgtcaggcaggtttgaattattggcaccactgctgtgctgctgagtcaatatccataccctttctctgtagtttctcttagattgatcttatgctggtataaagagcactgttcacttagagattatgaagcaggaactagctgtgtcagctgaggtattctttgagcattttcttcacttctttctcccccacccccaagtccctgccacaggtggaccgacacacagtctacaatatcatcaccaattttatgcgaacccgggaagaaggtaagagacagagctttctgggaaatgtcaaaagcaagcacatcctactttttcccctattagtaggactcattttacctggggttatatagaagagctggtatcctgagagagaatgataaagggaaagagggggtctgctccctcccagtgaagtaaagaaagggtagagtttgtttgagccagtgttttaaattcttgcctccacagcaatgtgtatattgttgcacatctcttcactgagtactttcttggaatggaaaaagggtcagccctgaagagaaaggggaggcaatgatagcagagggagaacacaggctaggagaaagcccacactttctgtgctgtgggacagtatagtaaccttattctctccttcccagagctaaagagcctaggagctgacttcacctttggcttcatccaggtgatggatggggaaaaggatccccgtaatcttctggtggccttccgcatcgtccatgacctcatctccagggactatagcctgggtatatcgtggtagccatgattagctcattggagctttatcagatgagtgaagctgataaaccaacctcattttttctctgttgccacaggaccctttgtggaggagttgtttgaagtgacatcctgttatttccctatcgattttacccctgtaagtagcaccttcattgtttgatcatatatttattgagtgtctgctatgtgccaagccctgttctgggcactgagggtacaggtcaccaaaatagacatccccgccctcattattttatattttaataaactaggaaatggaaaagcatttgacatatgaggaatgattcaaagcagcatgtattggggggaattcttaagctccttaacactgtatttagtgctgaaggctacaggattgcaaaacactgtccctgcccttgaaggctgaaacatttaagtaacaataggagattaggtaggaaaatgagtagtactatagctgttcagagaagacaaaagttcagtgtgagctagagtaggcaggaactgacttcacagttaagataggatttcagctggtttgtgagggatgcagaagatatgattctggagttggacagggcatctcaggctatagaaacaaagtgacaaaacaaagaaggcacaattgtgcacagtgtacagaaggtatttgctctgaccctcttgggccttcctcccattctgcagttgagttcccttctactgccaaatactcaagagtttcatcaccgtgtgggtgtgtgtgctgcaagcattagtggtttgaaagaaataaaaggcattctattgcagcatgccaaacagcatattgactctcactgcctttataatgacaccaccatctttgctgtagggaatttcttaccagcttatttcagttgacattatgttactggggaccacctgtctcctgaaatgaatctttttatctctttcataatcagaattcttattctaaccctatacccttgaaatcttgaaagatcctggtttagctcccacattcttctgtttttactttggtttttttggtgtgtgtgtttcttttttgtttgttttggtttggtttttgcttttttgagatggagtctcgctctgtctcccaggctggagtgcagtggtgcgatctcaactcactgcaacctctgcctcctgggttcaagcaattctctgcctcggcctcccaagtagctgggattacaggcgcccgccaccatgcccggctaattttttttgtatttttagtagaaatggggtttcaccatcttgaccaggctgatattgaacccctgacttcgtgatccaactgcctcggcctcccaaagtgctgggattacaggcgtgggccaccatgcccagcctttactttgttttattttgtgttttgtgttggttttgaaaagataattcattcacatgattcaaagtccaaaagggtgagaaatctccctaccatctttttttctccataatcaaccaagttatcagttatgtttgtatctttacagagctttttcatctatatgtaagcaaatgcttttaccaccacccccctaaaatcaatgtgtgcacatgcgggcatgtacacacacacacacacacacttctcctgtactttgcttttttcactgaacactatgtcttggagagtgttccacgtcagtatataagttagctctttcattctttatggctgcataatattcctttggccggaaataatgaataatttcactagtcctctgtggattgttgctaatcttttgctgttatgagcagtgctacaactttcatacatatgaatataatgatagaataaattcctaaaagaaatcgctaggtcaaagaatatgtgcatttataatttgggggagaggaacagtatttcatccatttttttgaaaggttatacaatgagcatgattcagcatttaaagggtagataattaaacttctttcatacccctttactgctactgtccattttcccattagaaacaatcactgttcacagctgtttattttcacagagataatctaggcaaaataaacttacagataatattaggaagatttctctcattcaagcagatttttgtatgttgttctgcactgcagtctatcagaagcagaaagctcttatcaagatattaattaaaacagagacacttggctttagtgtaactatttgagttacaaatactctttattgtcttacaaatcagggtttttattgttgttggttctgttctgttttgttttgtttttcagacagggtctcactctgttgcccaggctggagtgcagtaacacaatccttgctcactgcaacccctgcctccggggttcgagtgattgttgtgcctcagccacctgaatagctgggattacagtacgtgccaccatgcctgactaattttttttttatattttttagtagagatggggttttgccatgttgtccaggttggtctcgaactcctcacctcaactgatctacctgcctcggcctcccaaagtgctgggattacacgtgtgagccacatatccagccacaaatcagtattgtgtgccatcatagtggatctgatgagcttaaggttcagtttcttcactatgcttatatgctcactctaagaagaggttggcaaactttttctttcccttttttttttttttttttgaggcaggctggagtgtagtggcaccatcacagctcactgcagcctccacctctctggactctggtactctggtgatcctcccacccctgcctcccgagtagctggaaccataggcacatgacactactcccgactaattgttgtatttttctatagagacaggattttgccatgttgcccaggctggtcttgaattcctgggctcaagccatccacctgcctcgacttcccaaagtgttgggattacaggcataagccaccatgcctggccaactttttctataaaaggccagacagtagctttgtgggtcatatggtctcctcaactctgctgttactgcacaaaaacagccttagacacaggaacagctacagtagctatatcccaatagaacttttgttatcaacactaaactttgaatttcatataattttcacttgtcacaagatattcttttggtttgtttcaaacattaaaaatgttaaaaccattcttagccaaacaatgtcaacaggttgatttttactcctaatgcagagtagatattggttcttccttcaccgtcatcctagattcccttatcctttttcttggatcagatctcctgtttcctgagttcacatattcctcattttgtggtttaccccctcagtttgatggtgtacttcctttagtattttcctgagagaatgtatgaagaagtgagaattttttagatttgtaacccttaaatgccttcaatcttgtctctcatttttgacattatgggcatgtaattcaagaatagaaattctaggccgggcgcagtggctcacacctgtaatctaagcactttaagaggccgaggcgggtggatcacttgaggtcaggagttcgagactagcctgaccaacatggtggaatcccgtctctactagaaatacaaaaattagctaggcgtggtagcaggcgcctgtaatctcagctacttgggaggctgaggcaggagaattgcttgaacctgggaggcggaggttacagtgagccgagatcacgccattgcactccagcttaggcaacaagagtaaaactccatctcaaaaaaaaaaataaataaaaagagaattctagctggatgcagttgcacatgtctgcagtcccagctacttgtgaggctgaggcagaacaatcacttgaggccaggagtttgaggctgtagtgcactatgattgcacctgagaaagaggccaggtgcagtaactgacgcttgtaatcccgctactttgggaggctgaggcaggtggattgcttgagctcaggagttcaagaccagcccgggcaccatggcaaaaccttgtctataagaaatacaaaaattaactgggcgtggtggtcgagtctgtagcccctgctactcgggaggtggaggtgggaggatggcttgggctggggaggcagaggttgcattgagccaagatcatgcctctgcactccagcctggaagacagagccagactcagtcaccaaaaaaccaaaaacaaaaacaaaaaaaaaatggaaattattttctcctaagattttgaaggcattgctacatttaaatctagttattggctgggcgtggtggctcatgcctgtaatctcaacacttcgaaaggccaaggcaggcggatcacctgaggtcaggagttcaagaccagcctggctaacatggtgaaaccccatttctactaaaaatacaaaaaaattagccgggcatggtggcgtgagcctgtaatcccagccactcgggagacaggcaggagaatcgcttgaatcctggaggcagaggctgcagtgagccaagatcgtgccattgcactccagcttgtgtaacaagagcaaaactccatctcaaataaataaataagcctagttatctagttttcatttgctgtggagaagtctgaatttcttctgtttcataaacttttgtatttaccatttttttcttcctctctataaactgatgtttggttcaccccgatacattgaaacttcacagtgatgtgccttagtattggtctatttcatgtactgtgttgggtacttagtaggccctgtcaatctggtaacccgtgtccattagtcctgtaaatttttcttgaattctttaattgatgatttcttcctctctcttttctctgttccttcattttggaactctcattaatcttctgttggacctctgattttctgaccttttgttttctattttgtacctctgtctttttgttactttataagagaattccacagttttatcttttctatcaaagtccagtcatgaaaacagaaaccaggccaggttcggtggcttacgcctgtaatcccagcacttcgggaggctgaggtgggtggatcattcgaggtcaggagttccagaccagcctggccaacatgatgaaaccccatgtctacaaaaaatatataaaaattagccaggtgtgttggtgcgcctgtaaccccagctacttgggaggttgagacatgagaatcacttgaacctaggaggtggaggttgcactgagctaggatcaagccactgcaatccagcatgggtgacagagtgagactctgtctcaaaaaaaaataataataataatagtaaatcccttcttttactatgtttttggtggagtttgcaaagaggaaaaggaaaacctgatatatgttttcagtctgtcgtcttggtacagaaaccatcaaggctttctgttttcagaattacagctttttataagggtgaaaaaaatggaaatgtccatcaacaaggaattatctagataaactggtacaaccacaaaatgaaatcatagccactaaaactaatgctatgaaagaataataccataaaaatgttcttaatatgttaagtgaaaaaaattaaaaaccacatgtacaaaatgatttttaagtatatatatattttatatggaaacagtatatactagcacatagtaacaatatatatcagcgaagaaaggaatacaccagaaagttaagcatgcttatttctgagtggtgaaatgatagaaaatgtgtaatcagattttttaaaatgcctaaagacaaaagttcccaaggagtacctaagatcaagcaagtcttcttgctggggcctcattatcttactatcttccctgattgggtatgagtatcaccctgttctgcagggttaccaggttcgagcctgtgttcaaggtggtctgaaatgttacacaaacccacagcccttctcccttttccagccacctaatgatccccatggtatccagagagaagacctcatcctgagtcttcgcgctgtgctggcttctacaccacgatttgctgaggtgggtctagccaaggttagggtatatagcctctgcccatagatggctctgaagaaagagcagtaaaagcatggagaaaaaaatatctggtatacattttagggcatgacaccctgcaagtgtcttgtgtggcaggtatcttcagaccttcgatgtagaaaactttaccatctcttcataatccagagctggattcagtggcacacacctatagttccagctactcaggaggagtctgagtggaaaggatcacttaaacccaggagttcaaatccagcctgggcaacatagggagacctcgtctccgctacacaaaaaaataaataaacccaatccctatatggtgctgtcttttaaaatcctgtaactttgtcaacttgcctgtttttgaggtagtggggctctggtcactgcttggcaggaaggttagcttacattcatagctcctgacttgagtacagctccttgatgtagtacctgcttttagggactgatggcaaggacagggttgaccttgatgtgactgacacaccacccatctcaggcttaagatcttccttctgtcccacagtttctgctgcccctgttgattgagaaagtggattctgaggttctgagtgccaagttggattctctacagactctggtgagtgatttttctccttgcaggacccagctaccttttgacaagttaggggtcctaaaggatatagattctaggatagccaaggaacagttcatgggcctcagaagaggatacccaggatttgggcctttgtgtcgacctgaagcccccagctgcatatcgtcgtgtcccatcccccatcccatagtaactgaggaaaggctgaccaggactccctctttaggcttctattttatcaaccagggttatctcctacttctctgttcccttagtaggactgttaaaaatcttaactggtttttctgctgagaccagggctccttcaggtgccattatgctgaggtacctgcacatcctagggtgtctgagtgtgtacataactgatagcagcggtttccttggcagaatgcttgctgtgctgtgtatggacagaaggaactgaaggacttcctccccagcctttgggcttctatccgcagagaggtgagtgtcactcagataaactcactactgttaactttcaattgtcaggcatgaggggaaataatacatcctgtccttttccctctgtcatccccagggccaagatataatgcctggttattcaggaggcaagtagggggacataattctagttgaatgacaagagagagagtccctatgtgacggtcagctgcttggtaagagcagctgatcacctttgcacattacccacttcttgtccttctgtggcaaggagtgcaggtcatggtgcctttggcaccatggtgaatagaaaggtgagcagagccactgctcagagttggctttttgtttctcagaaagtatgtgtctctgtcctgagtgtgactaaggacttggtaagaacacaccaattgagaagacactcagttggggtgttaatttccatttctgtgtcctagaggttctcactcccctctccaacaaggaaataggcagtggattggtggggtctcatctggtgcaggctcacctcagtagccatgggatccctccctgacaggtgttccagacggcaagtgagcgggtggaggcagagggcctggcggccctccactccctgactgcgtgtttgtctcgctctgtgctgagggctgatgctgaggacctccttgactccttccttagcaacattctacagggtaatggggccgtggcagccaggaaggggagtgagcacaatagaaacgacattccttgcctgggtgcggtggctcacgcctgtaatccctgcactttaggaggccgaggcgggtggatcacctgaggtcaggagttaaagaccagcctggccaacatggtgaaacctcgtctctactaaaaatacaaaaattagccgggcgtggtggtggacgcctgtaatcccagctactcgggaggctgaggcaggagaatcgcttgaaaaggcagaggttgcggtgagctgagattgcgccactgcactccagcttgggcaacgagagcaaaactccatctctaaaaaaaaaacaaatgacattccttaagggccagtgacctttattgtttagtcccaacatatttggtgatttgggggcgatagccctactttgaattgaaaacaatttgagtgttaactgcttgcaaactgtcatgggtctcagtctccaacctctgtggactgtaggggagtcaggcaccatttggcctcctccccagctctgtgatgtgctgcttctctagactgcaggcaccacctgtgtgaaccggacatgaaactggtgtggcctagtgccaagctgttgcaggcagctgcaggtgcatctgcccgggcctgtgactctgtcaccagcaatgtactgcctttactgctggaacagttccacaagcacagtcaggtaagggagcagaatctttgggggaaatgatgggacctgtgtgctaggttccctttctcagagagtgagctaagttttagcttgggccaacatagtagaccttgggttttgctcccattagctgctgctgctgcttcccttactcactttttccctgtctcatacataaaaggatcattctcccaagacaggaggatagcttgaagccaggagttcaagatcagcctgggcaacaaagtgagatcccatctctaaaaaaaaaaaaattttttttaaattagccaagcaggacatgctggttcatgcctgtaatcccagcactttaggagaccaaggcaggacaatcacttgaggctaggatttaaagaccagcttgggcaacaagacaagaccacatctctacaaaaaaaaaaaaaaaaaattagctggataaggtggcacgcatctgtagtcccagctactcaagaggctgaggcgagagaatcacttgaacctaggaggtcggggctgcagggagctataatcatgctactgtattccagcctggctgtggcatagcaaaacccccatctcttggaagaaagaaagaattttccctatatccagagtagcaggattgaaatcctttaaaatattctttgactctagtaccccttgaaacgttacagagcagccagcggcggacaatccttgaaatgctcctgggtttcttgaagctgcagcagaaatggagctatgaagacaaaggtgaggttgccttccattgcagtgctctggggactgttgaacacttcagcctataaaggatagcagggcaaagagtgctgtggaaaagtagtctagaacagtggtcctattctgaggttgtagcacaagagaacacttaacagatgagatggatgagatctgtttatttttctcagtgtgctttctggatacccaatggattaagctctttaaatctgccccaggaggcggggcatggtggctcacacctataatcccagcactttggtaggctaaggcaggcggaaaacttgaggttaggagttcgagaccagcctggccaatatggtgaaaccctgtctctactaaaaatacaaaaattagccaggcctgttggcacatgcctgtaattccagctactcgggaggctgaggcaggagaatggcttgaacctgggaggcagaggctgcagtgatccgagattacgccactgcactccagcctgggcaacagaggccttgtctcaaaaaaaaaatctaccccaggttggctgtgtatcacagcttagtcagggatatggaatgcagtggcttccttctaacctggcctctgtctcttccctagatcaaaggcctctgaatggcttcaaggaccagctgtgctcactggtattcatggctctaacagaccccagcacccagcttcagcttgttggcatccgtacactgacagtcttgggtgcccagccaggtacatcttaagggaaagagaagaggaaaatattggtccttttcttgtaagactgccttggtgaaaagcagccttactatcctcttcttactgcaactctggatgatttgggatttctaataagagcttagaagggttgtgatggctgcaggggaagaaagatgagattcatgttcccttctaactacagatctcctatcttatgaggacttggagctggcagtgggtcacctgtacagactgagcttcctgaaggaggattcccagagttggtgagaatttaaagcaatgagatagagcaagctgttccctgcctctgtattggcagcaaaagatcaagctaggaccagggctctgtgcttctgacccttggctctccttaggggaggtgagctctgtgttagactctggctgctaaccagttggagagatgtaggactgctctcttcttaggctttaagaagccctgtccaactcagtggtgtaggtacttgagttctgctctttagcaaggaggcgttgggagctcacactcctgaatctgcctaatatcagacgtaggcaagagagctgtgagcccaggctcagccaatgcttatctgctctgcgcctccagcagggtggcagcactggaagcatcaggaaccctggctgctctctaccctgtggccttcagcagccacctcgtacccaagctcgctgaggagctgcgtgtaggtatgtgtctctaatcctctgtggcccatccctttccagcaaggctttggggccttcgtgcttcctatcacacagtaaacctttgtctcatgggttgctttcaggggagtcaaatttgactaacggagatgagcccacccaatgctcccggcatctgtgctgtctgcaagccttgtcagctgtatcaacacatcccagcatcgtcaaggagacactgcctctgctgctgcagcatctctggcaagtgaacagaggtaactactaggaataaccaccaacggactgggctgaatagggagctgtagtctctaaggcagtggttctagctgtagctatacataagagtaacagaatcaactcttttaaaagaaaaaaaaaatactgatgcctgcgtccaactgaatcagtctctgaggagggatgggacttaggcaacagtactattaagagtacccggccagggccgctgctcttgcctgtaatctcagcactttgggaggccgaggccagcagatcacttgaggtcaggaatttgagaccaacttagccaacatggagaaacccagtctctactaaaaatacaaaaaattagctgggcatggtggcatgcgcctgtaatcccagctactggggaggctgaggcaggagaatctcttgaacccacaaggcggaggttgcagcgagctgagattgcgccactgtactccagcctggccagcctgggcaatagagtgaaactctatctcaaaagaaaaaaagggttgggcgcagtggcacatgcctataatcccagcactttgggaggctgaggcgggtggatcacaaggtcaggagtttgagaccagcctgaccaacatggtgcaatcccgtctctactaaaaattatctggtcatggtggcaggcgcctgtaatcccagctactcaggaggctgaggcaggataatcgtttgaacctgggaggcggaggttgcagtgagccaagatcatgccattgcactcacacctgggcaaacagggtgaaactccatctcaaaaaagaaaaaaaaaagtgccgggctgggtgtggtggctcatgcctgtaatcccagcactttgggaggccaaggctgatggatcacttgagctcaagagtttgagacctaaccagccgatgcaacatggcgaaaccgcatctctacaaaaaatacaaaaattagccaggagcagtggcatgcacctgtagtcccagctacttgggaggctaaggcaggagaatcactttgagcccgggaggcagaggttggagcaagccgagatcgctccattgcactccagcctgacctgggcaacaggagtgaagccctgtctccaaaaaaaaaaaaaaaaattacctaggtaattttcatgtgggatctgaattgagaggcatcaccctaaggccgtggtgctcaaaagatggtctgttaaccagcagcatgggtgacatctgggagcttgttagaagtgcagaatctcaggccctcactgatcagaatctgcattttgacagtgtaccctggtaactcgtagactgttgagtttgagaagcactgctccaatgcaaaagtgacagcagcctgccctgtgggtagattcaggcccactgtggttgatccagcagctgttacatagtagaatgaatactagacttggattataacttgggcttgattcctgactttgcacttcctgtgaccctggaaaagccactgatcatgtatttcattgtgcctccatgtccttctctatagagtgagggaaatgatacttctaaggttgttatgaaaaataaggagagaatatatacaagtgcttctgctgcagagcctgggacagagcaagtctcaactatgaagtctgaatagatcagaaagaacagccaggagaataaagtgactcagctttttaataaggcactcttggtcccttcagtcactcttctttgttcctctcatctgctgtgtaattggaaacacctgaaagtgcttttaagcaaaccttacagagaacactttctcatcaacagggaatatggttgcacaatccagtgacgttattgctgtctgtcagagcctcagacagatggcagaaaaatgtcagcaggaccctgagagttgctggtatttccaccagacagctataccttgcctgcttgccttggctgtgcaggcctctatgccaggtaactttccacctctccttcctggcctttgggaactttgccctctgctggtgttgaacagcaccaccctctgggtattggtggtactgtattttgtaccatcagaggtttattttcaatcctttgtcctcagagtgagatttcacttcatagcaaagggtgccaccctgaccagtggcaggaaccaaaatccactagtgttagcaacattcaaaagaatgcacaccttttccccatgaagtgctatgtgattagtttacttagaattggactctggagtcaagcccacctggttgggttttatcctcaactctaccacttgctaacttaggtgaagatattcagcctttccacgcttcaatttcctcacttgtaagatggagataaagagtaccgtctaggctggcgccatggttcacacctgtaatcccagcacttcaggaggccaagatgggaggatcacttgagtccaggagtttgagaccagcctgggcaacacaggggaccctgtttctacaaatagtcagacatagtggtgcacacctatagtcccagctgctcaagaggctgaggtgggaggatcacctgagcccaggagttcaaggctgcagtgaggcatgattgtgcctctgcactcgagcctgggtgacagagcgagatcctgttcctgtctcaaaaaaaaaaaaaaaaaaaactgtttcacagggtagttggtaaggattaaataagttagtgtatagtacctgccacataggaagtactcagtgtatgatagttgctataaataataaggacccatgaagataaatctatgtttttaattttttcagagaccaacattactatttttttttccttgcatctccagggacaccagggacaacatttctatttcttatgttaagaatgttcatcttagctatccctctttcccactgttggcctagtctaaagactgtgcagagttctcaggagcgctctgtggccccaggtcagaccactcctgtttctggtgccctgattctcaggactatagcactaccagagaccagattaagaactgctgtcgtggctagagtcaagccccagagtcagtgatgctgacagaacccaatcattcatttcttgaacccgtcatggtcttgtgattgtgtgcatgtgtgtgtgttttgcagagaaggagccctcagttctgagaaaagtactattggaggatgaggtgttggctgccatggtgtctgtcattggcactgctacaacccacctgagccctgagtaagtataatcatggatgtggcttgaacccagggagaaggatagcattcttaggaagaagcaacaggtagctgccttgtcagctgtccttttacctatatgtaaatgtggtgcagttaatcgtcttgtaagttttgttgacaaaacaaaaggaaggggctcttagcaccatggactatgagggtgggaagccagggccagtggttcttagccgcagatgtgcttaagaattacctgtagagcattttaaaatataccttgacttcccagatgggaacctgaatggaaatgattactggcacatatgtgccaaattaatatttgttcaatgcatgaatgatcagggcatgtcccattgacgtggtgatcctaattcaaaccctaggttgaaaagcacgtctgtggaggagagggctgctttagaatcctagctccttggtcatacctagtactctgcccccaggttagctgcccagagtgtgacacacattgtgcccctcttcttggatggcaacgtgtcctttctgcctgaaaacagcttcccgagcagattccagccattccaggtaacagtcttagaacttacatccttcaagctggtttttttttagggctaatctggaatgggtagaggggcagacaagcttattgctggcaggcttgatcgggctctccttcctttataggatggctcctcagggcagaggcggctgattgcactgcttatggcctttgtctgctccctgcctcgaaatgtaagtgagcacatttgggaagtactgttatttaaccttgacaaggtgactccgggctgaaatttgccacaggctaagctgatcttttacttcccccaccagagaagttagttctcatccgtcccggtccctgctgccactatgtactggttctcttggagttcaagtgttctctgggtccattacatggccaggttttctgtaggtggaaatccctcagctgaaccaactcatgcgggagcttttggaactgagctgctgccacagctgccccttttcttccaccgctgctgccaagtgctttgcaggactcctcaacaagcaccctgcaggtactgagatcagactatgtaaggagcctcccagaatcaactacccatgaaatcttatagctcagtactcattctctttttaaaaggagcttgctaataacattaacagggcttcaactgctcaagcactgtcctgggactgcccgtgggaaaagcgtcaagaccacagttgggcagagctttatagtacctaagaagagaagggagcacaaagagtctagttctgccgtcctactccctacagtggggctagtgtggataattctttattggaagtagatgaccctctcttttcaaatggcagcacctctgtattatgagaataccaggctcttatgcaggtgtccaatcattttgtccacaggcaaaaatgatattttccctttctaacagcttctcagggagctctgcacttaaagtgatttgcatttcattgctaaagggaaaatgtgtagcctttatgtcagcatttcctctctcctttttagggcagcagctggatgaattcctacagctagctgtggacaaagtggaggctggcctgggctctgggccctgtcgtagtcaggccttcactcttcttctctgggtaaggagttggagtggagtctggttagccagagaggcaattatgtctggttaaataaaatgtccctgtttgaccctaaaccataaacatctatgtctcagggttctcgggtttgagtgtcattccccaattgctctctctgtctccaattacaggtaacaaaggccctagtgctcagataccatcctctcagctcctgccttacagcccgggtacgtcctttctggagacagaagaacccaggacctaaacaaactttctggttgctcctattcctcccaaggacttccatcctcccctgtgtgttttttgttttcttttcttttttctttttggagacagggtcttactctgtcacccaggctggagtacagtagtgcaatcacagctcactccagcctcaacctccgtaggctcaagtgatcctcccacttcagcctcgcaagtagctgggactacaggggcaccccaccacacccaactaatgtttgtattttttgtaagaactgggtttggccatgttgcccagactcctagactcaagcagtccacctgccttggcctcccaaagtgctaggattacaggcatgagccaccacacccggccccatccttatctttggcacttaagattcttcttccctgatgtacctcaaaggctcttttttctccagctcatgggcctcctgagtgacccagaattaggtccagcagcagctgatggcttctctctgctcatgtctgactgcactgatgtgctgactcgtgctggccatgccgaagtgcggatcatgttccgccagcggttcttcacagataatgtgcctgctttggtccagggcttccatgctgctccccaaggtgaggagtctgaaagaaggtccccacatatacacatctctcctttgcttggccacattccctaagataatttagggcccgcttgcttctttagagctatattgtggtctgtgcctagaagactaaacttctagattcttgtcccacttcttcctttcatgggcgtatcttgcttattctgagcgtgaagggctctttcacccgtttgtaggctgatgtctcagcctcaccacagattggaattgatttctcaagctatatatctaagtccaatttctcccctaagcctttccattttttacagatgtgaagccaaactacttgaagggtctttctcatgtacttaacaggctgcccaagcctgtactcttgccagagctgcccacggtaagtcccacaggcagagcttctaagcaaaggacaaagctattcttccccagatggggctagaaaggggagggaacaagaaccaggatcttcatgatgtggccatcccctaccttgcccattgccccttagcttctttccttgctgctggaggccctgtcctgccctgactgtgtggtgcagctctccaccctcagctgccttcagcctcttctactggaagcaccccaagtcatgagtcttcacgtggacaccctcgtcaccaagtttctgaacctcagctctagcccttccatggtgcgttgagccccagcaactcttaggcaccagcatctctccctgggcatgctctcacctccttgtggttgtgttccaggctgtccggatcgccgcactgcagtgcatgcatgctctcactcgcctgcccacccctgtggtaagtacctcaggtgtccttccctggcctgggaacatctcaagagacacataagtacctttttgccttagtcaggtgggcttggccaccctggtgtgtaattgagatctgaattacaaggtacagatcttgtaattctgggcccaaggattcttttccttgggcccagaaggtaacagaaaggccatcctgccacttaacatcccttggaatcactaaagatgttttgctttcctcagaatattagttgtacagaatcaaaaaagcggtactttcagttgccttggatgagcaaggttgattatatcctctgactccacagctgctgccgtacaaaccacaggtgattcgggccttagccaaacccctggatgacaagaagagactggtgcgcaaggaagcagtgtcagccagaggggagtggtgagtttctaggtcgtggggagagatgggaccaagatgagcctcatcactaatgctgccaactttctttttgcctacaggtttctgttggggagccctggcagctgagccctcagtcctggcctagactgttctgacaatctaacctgggattactaactgttgagccatcttccccaaagcagggaaaccactggtctctgactgcctttcccacagacacagcacaaatgctaggcctctgttgcatggctgtacaaagaacataagagtccatatttctagtggatttgtaaaataagtgtgtgtgagacacttgcgtttgaagaaagatctagggtcctgggtctcttgcatttatatgtcagaaaaggggcgatatgctgctgaggggtgagtgcatatgagtgtggccctgaggaccagggctggcagatgttgtctacctgctgaagaataaagatttcttttggtaa

SEQ ID NO: 454 - DNA, 118328 bp, Homo sapiens
  source 1..118328: mol_type = genomic DNA; note = NC_000001.11:c28088671-27970344 EYA3 [organism=Homo sapiens] [GeneID=2140] [chromosome=1]
attgtgaggtgactctggccgcttacttccggttcctagcgatgcgcatccgggtcacgctaacgccgcggtttcctccgctcgattggttctactgtgggtctggactgatctccatgtcctgttgtggggcttttacagcctttgggtgagtctcagctgccaacagggtctgagcgcagccgggcgagcacagcgtgaagggggatgggtctagagttctgcctcggtccttgtgggtgggagtctcttcgcctgtcccttgtcactgcagtgcttcactcacctcagccctttccttcacgctggcctcgccttattcacctcagcttagccttctcgcgcttccgtgcctctgtcgcctcgctgtttttcctcagcctcatcagtccttttccaacctcggtttcttgccttacgcctcagcgcttctctcagccactgcctctccttttttctcctcctcccttcttttagaacctcttttcccctacccctgatctgggatctcagcgttctttcacctagcgagacggcccagcttctcattgtgctcactcttcaccacgagaaactgagcctctccctagggtcctagttccttgtcccccaactttcttcagctttgatccttcctcctgggaccagtaggtgacagtgcttctcctggggttcttctgcctgtccttagctagaggagagctttgccaaagccccgaaatgggaagacttccccagcctgggggaagttttgccttaaggcgccgggttagactgaactctggtagcttccatagttagggtacaacaaaggcgttcctagttcttcgctttacctcagttttggggctctctcaagagcagctaacaggtggcaggcacacggtactgctagcagttgggctggcgcgatcttgttaattgacaagtcatgaagaagttctgtcagttttgtgttcccatgagaatggatgtgcacagctgaggcaaaaacgccaatattttgggacgttcagctctgttttcggcatggacgcttcttacaggacacttgtgatgatagaggacagaatttgtggagagatcattagccccagatttatgaatttattgtgttgtttccgaaaagtggtctgctgaagagttcactatagtaatttcaaagtaatctttaaacttagtatgcacatatgcattttttcatttttactgtattaagttttctatttgtcttcctcttccttcattagccagactttacttagaattacattacttagaagtacattacttagaatattcttctaacttttgtatttttttttccttaccatttccacctttgtagtaaaactatcattttctcattttgagatttagggcacctttcttaaatttccctagaggtttaaagtcatttataacatgaaggaattgcatttaataatggttagtgctccctttcccaaattttgtgatctagagtataggcttgggtaatctttattttttcccgatgtttatagtgtatatctagcacttgattgcagcggtttttgtgtcatcagtttctgtaatctataaattgtgctttaaaatgtagtacttcagtatgaacttaaatacagctttgagcacctgcttatcttttggctaattagctatagaaaaatcttcattatatgatacatatacatataagagtgtatagtccttggcttattccaaaattgggctctcttcagctgtttttagcaaaggactttggagcttggccatgttagtcctagaagccacggagaaggacccttctgattggctttcaggacttatctaactgctaagtgaagcctctttgaaagtttcttatgtgtacctcctccccactacctagctctagcttctgtccaacctggcctattttccatccttcaaaacaaaccccaatgtgtatggcttactccagctgcttccttaccttcaggtttgtgggcttcatttaagccatgggaatgccagcttaattaatgcagattaagataagaacattaaaccccaaaaatgatgggaaatcactctgtcttcaaaacaatagaaaataataaaatctagttataaagattatataccattgtcactagtaagaagtggcactcttatttacaaaacataaagaaattagggtttaggtctggcatggtggttcacacctataatccccagcactttggaaggccaaggccagaggattggccaggagttcgagaccaacctgggcaacatagacaaaattagcttggtgtagtggtgtgcgcctgtagtcccaactactcaggaggttgaggttggaggattgcttgagcccaagattttgaggttacagtgagctgtgatcacatcactgcgctccacaaggcaacagagtgagactctcttaaaaaaaaaaaagaaattacaacttaaacagttaatttccaaggtcatttttttttaagtcaagaagtcctatacatgctctcaagagtagcgagtgttaattccattaaagctgtaggctggaaagcacaatatagtatttagtgggtcatttcagtatatgtcatatatgaatgagactattaggataagaaatctgtgacatggattttaaaatccaaagccgaagtcattttgccttcaaagagtgactagagaaagaaactgttttgtgcagaagtagaagttgaaaagttttaggagtcttttgttcttctaaaatgactttggcctgtatattctgcattgaagccattaaatgaaatgagcatcctgtgtagtcattggagcagttgtgttccatgctgctgatcttcaagcctgaccctccacctagctgccaaaccaaaacaaacaaacaaacaaacaaacaaacccagagacagcttaatgtgtgtttgtttttaaagctcaggaaaaaaaattaccgttgattttctacaaaaatttctactttagttggtagccctaagggctcaatttaaaatatgtttctgcatattagttttaggcttaccaagttttcttattttggtttggtttgattatttttggttcttttttgtcattttatttgctaatgtactttgtcttacttgttttgtttgtttgttttttggtccttgaatcctgtgtttacggagatgtagttttttgtttgtttgtttgtttttttgagacaaaaaacaaaacaaaaccttgctctgttggccaggctgtagtgcagtggcacgatctcggctcactgcagccctgacctcctgggctgaagtcatcctcccacagcctccagaatagctgggactacaggttcatgccaccatacctggctaattttgaaatttttttggagaggcagagtttcaccatgttgcccaggctgatctcaaactcctggactcaagcaatctgcctgcctcgggctctcaaagtgctgagattaaaggtgtgagccaccacccacaggcggctgatgtagttttgaaaatttaagaaacaaagtatacctccaacaagtccttgtcacttgtaccttgtagcattatggtttctgtgctgtgcctaagctgtttcatgacttcatttattttgttttgattataaataaaagcctcatggaacttctttttaggtagcggtttgtccaaaagatatttctgttctgcatgtaacaacaggatactttagctcatgtatgatttaaatggaggaagaatagttcaaaatagaaatgtgtattttaaaatattaggaatagtcagcactttgggaggccaaggcaggcagattgcctgagttcaggagttggagaacagcctgggcaacacggtgaaaccccatctctactaaaatacaaaaaattagctgggcgtggcggcgtatgcctgtagtcccagctactcgggagactgaggcaggagaattgcttgaaccagggaggcggaggttgcagtgagctgagatcgtgctactgcactccaccctaggcgacagagcgagactcatctcaaaaaaaaaaaaaaaaaaaaaaaaaaaaaaaatatatatatatatatatatatatatatatatatatatattttggaatagtcaatgcttcccagatgttcatctaattggtttataccaaaaggttgaattgttatattgatagtaaggtggaaaataggtggactttctgttttctaattaacttaaaaatacaagtgcatattcttttacaaagtgtatggcttaagctctaaactaccctgttgatactggtatcttttactgtcagataacatagcaaataatggaacatatcatccttgatatttttatttagttccatcaacctaagttccagggtagctaattattaaatgtagaagtaatttaggcattttctctgttctttatagtagtatatttaaaaacagccatttaaaatatgggcttcctaaaatttgtctttgctgttttcccatttaagtatgcaatagtattttgaatcagaaaaggaatgtgtagtttaaatagtgccaacttactgtaaataagttaacagatcagcccaaggcagtcagtgcttaatatcgtgaagatcttactacagattgttttggatgcactttaacttattagctgtggttaatgtttgtagcagttagatggttttcattttcttccctagaaaataattagcaatactctttgtaatacatttatttcagcaaatattgtttaggcacctactgtgtacagttacagtaatacatatttaggctatttatgtggctaggtaatattgtaccaggctgatatgtacacttaaattctgaatttgatcttatttgtacatttctgaattaaacgtaagacaacataattagaattaaataaacttaattaacataaaatcatgttctttcgttatagatacaatcaaataattttcacttgggaaactttcacaactgaaccatgaaactctgtagtggtaaaacagtaaaaataaaagtgaactttatacagcacttactatgtaccaggaactattttaagtagtttacatgtattaactctttaatctttacaaccctatgaaataagggtactattcttttttttttttgagacggagtcttgccctgtcgcccaggctagagtgcagtggcacaatctctggtcactgcaacctctgcctcctgggctcaagtgattctcctgcctcagcctcctgagtagctgggattacaggcgtgtgccaccaagcccggctaatttttgtatttttagtagagatggggtttcaccatgttggtcaggctggtcttgaactcctgacctcgtgatctgcctgcctcagcctcccaaagtgctgagattacaggcgtgagccaccgtgcccagccaagggtactcttcttactatctccattttacatataaggaaactgaggtacagaagttatgtaacttgcccaaagtaacacaactagttatcaaagagctggatttgaacttagtctttttggctcctgagttaatcttatttgtacaagggtctgctactttagtgatttctttctttataggttgaggttaaaaatctagtttgtctgaaacacaaaagaatactgcttttggttaggaaccttaaggagggttttacttggcctttttactaatgctggcttaaggcaaattgcaaaccttttactaccgatgtttctcagatggcaaaaccatatattaagaaagcaataagggatcaaattcctcccccgttagaaaaattatcttatggaagttaattactttggagttacttggagataagtcactattttttataaaatggcccctcgaagttaatttttttcttttaccttcagagtattaaacaaatttatgtaatagtcttaaaatacttaaatcttaccattcccatatgaatttaacaactttgaaatataaaacagaagactaaaactgaaacatctgatttgccactggtctcatttccaaatttggaaatttatgtgaaattaaggacattcatctcttcaggactatcatgtttagagtacattcatctctttagggctatcatgtttagagtagtatatttaaattagtgattttatttttactttagaaaagatgaggggaactttcacaaacaaattactttctaaatgagaagatgcaaataatagtcatttagaatattattgatcatattaagatgattcttttgttcctttattaagcccaaataaaaaaatttaatcaaatatctgggggaaggagattattttatataagttgaggtgcaccttaatgcaggagtcttgtactcagataatgatattatttttctgaatattttgaaaacagtcgagaatcgtagaatctggtttacagaaaaagtataaatatttctggtaagaagtgacatttgattaggaatactaattttaattctcatgttaactcttattaattgagacattaagtatactgtttttttatagtagcttttgtcctttttccacttggtgggaaagtattgttatggagctgaacagagtaagctttgctatgatgataatacttgttgatatttagaatgttctttacttttagttaaacatttaatttttgattcaaagcaattcccttttaaattgcttctgcaatttaatttaatttaatggcttccacattcaaagcaatgtgggtctgataatcagtgtatttaaacatttcaatagttttctttcacctgaaatttaatattgtagcaattactgaatttaggaaaattggtaggtagttgctatcagcaccgttactacgggaatacattagaatgattagcttttaggtgaaattgaattttttctttagtttccatagtgactgaaaacgatttaggtcagcttcacctgttgtgcccctcccccttttcaaaataagaggaacatttaatttagcacaatgatgttaattttttcctagtagattgatgaaatgaatgtgataatctcactctctttaccaaaagaataatccaatatatacatgtatgaattttgggggaatatttcagactttagagaacattataggataaaaaatagtacctaaatatcttataaaaatcagtgttttattacatcactgaatttttctcttttaaatttaaaaatgtcaaatttaggaaacatctgtgataatttaaagaataatttttgaaatctgcttttgcttttcaccaggtgttcttctgctataggttaggaagcagtagttaggcaacactaatgaataatattcttgagagtgagaactagagcttcacaaagagaataggccatctctcatatttagtggggcatttaataggtagataaactgaaaatttttgctttcatttctatgtattttttgttagtatgtatttatttactgtaggtacctcacattctgtgcaaaaaaaaatttttggaagtaactcagtggtttcctttatcttttttgttctctttcagaggcttgcttatataaaactacaatttagagaaccatcggccgggcgcagtggctcatgcctgtaatcccagcactttgggaggccgaggcgggaggatcacctgagaggcaggagttcaagaccagcctagccaacatggtgaaaccccgtctctaccaaaaaaaaaaatacaaaattagccaggcatggtggcaggcgcctataatcccagctacttgggaggctgaggcaggagaatcgcttaaacccaggaggcggaggttgcagtgagccgagaccacgctattgcactccagcctgggcaacaagagcgaaactccgtctcaaaacaaacaaacaaaaaagagaaccatcaaactctgaatgttgtttcctctgtagtatgaagtggttattttcttccctttttgactggccattttttttttttttctgataaagtggcttttaaacttttctgatcatgacccactataaaatacattttacattgctatccagtactcagacacatatatgtacatattaatatttgaaatcgaaacagaagtttcttgaaacagtatctttactactggtgatgcattgtaatattaatattttctattctattttgtttgtttgtttgttttttgagacaggatctcaccctgtatcacctgggctgaagcgtagtgacgctatcacggctcactgcagcctcgacctcctgggctcaggtgatcctcctgcctcagcctcccaagcagctgagactacaggtgtgtgccaccatgcctcactaattttttttgtttgtttgttttgtgttttatagatgcggtttcactgtattgcccaggctggtcttgaactcctgggctcaagtgatcctcctgcctcagcctcccaaagtgctggaattataggtgtgagccactgtgcctggcctctatttgttttattgtttttaatttaaaacaaactgctggtttccattcactaagttgatatcagtgccgttactacgggaatacattagaatgattagcttttaggtgaaattgaattttttctttagtttccgtagttaatgcaatgtacctgcagtttgcaaaattttagtgactgctagatctttcccctaatattgtctttttgtaatggaaaatgtttaggtttggggccaggtgtggtggctcatgcctgtaatcccagcactttgggaggctgaagtaggaggatcacttaagcccaggagttcaagactagcctgggcaacatagcgagaccctgtctctaccaaaaaaaaaaaaaagaaaatgtttaggtttgctagtttttttctctgcaatgtacgtggatggattctgtaaaacttaacctaaatagctgcagaacaatcattgagagagggaggtcctgttgccctgattaccattactgtcatccctgttctttaccatttctaggcacattattttaaaaacttattttggaatcgtgaggttgaaaatgctcggttgtatgctgagcttctatcgttagaatcctttgctagtttccatctaacagtccaaagtttaggtcctttcagttggttttcacaaaccttgcttctgttcttggcaactagtcaaaaggttacaaagctgctttattctgctctcttctggcccaagtccagtctttgtaaaccaaaaaaagaggactgaggaatgaagcagtttgctcatgtgtatatggtcaggtgaaataacatgactgaagagtaattagggtttgcgacagtggattacatttatgtattgtcccaattcgtttcctgtaatcacaaagggggaaagggcgtagaaatatcaacagttccttgcctatcctagctggtagagtgaaacagggtcagcagacatactctactatttttataccactacctgctcttaacacttagtgagcacttactatgtgccaggcactatttaaagcacttcacttgtgttaactcatactcatacttgggaggcctggggaaaaaaaatgagaatggtaaaggataaagaagaagacttgccatcttctcgtatgttctcattacttggcttaagaattctggctgttgatgactatagtatggcatatcatacattttaagctcagtcagcttttaaatatcaccagtcctgtctgcattgttccattatgagacacatagctgtggtttgagaactcaggctttgaagctagcctgcctgggctcgaataccaggttggtgacttactatgtgtatagcattggggaagttactctctgtgccttagttttctcatctgtaaaatggtgataataacaaatagcttctattttatagacttattgaaagattaaaataattaatgtattacctgggcatggtggtgcatgcctataatcccagctactcaggaggctgaggcataaaaattgctaaacctgggaggtggaggttgcagtgagctgagatcatgccactgcgcttcagcctgggtaacagagcgagactgtctcaattaaagaaaagaagaagaaaaagaaatagttaatatattaaaagtacttagaacggtacctgacccataagaagcattccataaatgtttgctattaatagtatcaactcacagttggagctcctgagagtgtttgtgactatgatgagttctgtatatttgctgagtaacagggcatgattgacatttaatgttatattgctcaggagcttgaaaatatcttgtcttgaggacctgtagggaaagttcttgtgtagcgtgttggatttaaagctaaaggttatcaaggctacaggcccaacttttaaaatctctcttaggaaccacttgttatttgggccgtaatcttaatagttttaatggtttgctatttgggaaaacttaagtggagctagttagtgaattgactttcattcaagaccagatttctttcctttttatctttggtgtaagatatttatttattttatttttctttaacaaacacttatattatcctgtctgatggagttttgaaggggtaaataaatttggagaaataaaacattaataaaaaaactgaacctagattttacagttcttctaacagctaaagacatagatttcaaaagacttagttctgttagtatagtgtatagtcagtgttatccaaacactgataagctgatatataggactgatgtatagatgagatatataggtatgtagaatgttagagaattgatgacatagggtacaactttgtataactggaagcagcacatttatagaatattcatgttgtgattctcagaaattttaactgcacagattaaagaaggatgaagataaagttttagagtctttgagtctggatcttcaaacagattttttaaaaaatttcttttatcatattcttattctttttgatttcttgtttttttttcatgtcacttgttaacacccactacaaacagagaaattcttatgctgacaagttactaaaattggagagagatccaaggagtgttggaagaaatatagaagaaccattgtactgttattaagctcactttgacatagctaattcaggttaacctcctccttcttaatactttttactatggttttgaaatttttcctttggaacacatcttcctgtttcattaggaacttgttggggaagcacggtggctcatgcctataatcccagcactttgggaagctgaggcaggcggatcacctgaggtcaggagttcgaggccagcctggccaacctggtgaaaccccgtctctactgaaaatacaaaaaacttagctgggtatggtcatgcacacctgtaatcccagctactcaggaggctgaggcaggagaatcgcttgaatccaggaggcggaggttgcagtgagccgagattgcgccactgtactccagcctgggtgacagaataagactgtctcaaaaaaaaaaaaaaaaaaagattgttttgtaaacaatttcaaaggatgatttttgttaagtaatattagaaattataaaaacagaccgggcgtggtggcttgcacctgtaatcccagcactttgggaggctgaggcgggtggatcacctgaggtcagaagttcgagaccagcctgaccaacatggagaaccccgtctctattaaaaatatacaaaattagccaggcgtggtggcgcatgcctgtaatcccagctactcaggaggctgaggcaggataatcacttaaaccctggaggcggaggttgaggtgagccgagatcacgccatcgcactccagcctgggcaatgagagcgaaactctgtctcaaaaaaaaaaaaaaaaaaaagaaattataaaagcaattattcttagagagacattttttttcttttctttctttcttttttttttttttttaggcagagtcttgttgtgtcacccaggctggagtgcagtggtgcgatctcagctcactgcaacctccacctgggactacaggcatgtgccaccacacacagctaatttttgtatttttagtagagacagagttttaccatgtgggccaggctggtcttgaactcctgacctcaagtaatccacccacctcggcctaccaaagtgctgggattacaggtgtgagccaccacgcctggccgagattctatttctggtaaactagtatttttttctattaagaatttgttagagcctaaatatatgtatatattttaaaaagcaactttctcagtaagttctgacagtgttttgttaagtgtaaagttactataaatagtcctacagctgataatactatgatatgttagtcatgcctccagaacaaagtagccagaagaattcaccaaatttactgcagtcagttggctgcactatttatttatggaaggtattgaccagtatggtgatggtttttatctgtctacagaaagtcccatcagggaggtgtaggtggttgcagtttttctggttacagaaatgtgatttgtgctgttgcctaagttatgagagctgaaagactctcttaggatcacactaaagggagccttaagagaggttagctgagtgtaggtctgctggatatttgtgtctgctttagcagggctctgaatacaaaggattctgagtggatatgttagtaagtatgttagatatttttttaaaggtattaaatcaagaaaggtggctttcagctgatgagactttaatggatttctgaaagataggaaacagtgagaccaaattgttggaaaaaataggagaagaaatcacagcgaaaagtatatgtagaagtttcagaaatgtagcagactccaggtaaacaaatatgaagaactgaagggtacctggaatatttatcaatggcagcaatctgtgagcatttattcaagagaaatggctgaatcttggcaaaaacagcaaactttgtggcattttaatttgtgcttttccctctagctcctcagtagccttgaaaaccaacagcctccaatcatggtgaaaaccagccactggaagggatagatcgagtttagagttcttcaaaactccattcccagagttgtcattattttacctagctagtagttccttgaaaaacctcattcacaagaccatctgtatttgacctgacttgaagctcacttagtacaaacaacctttccccttgcagtgtttattgaaaacagttaaaggcagttgttgaacaacttgagtgctcaccatcttgagtgacagtgaatagttagatcgaataataggctaaccaagaagcttaaaaggaaaagctgggaaatgagatgttcataaggaaatttaagaagctctggtatatttctgggaatctagaaggctatgtgcatgtgtagggttgtgtgctgcatgcttaggaaagaactaagaaggtcctaagctgtcagttctgattaatctctagactttgtgcaagcaagaagtaaaggctaaggaagggttgtaaactgcttggctgaatgtgaaaggtatgccctaacacatgtagttaggctgtcaatacacactgagtcttatactggttttaagcatttaaggaagtctctgcccagtcattagctgatcacaaatgaacagcagagactttagtgaccacatatgatagaaaattaatattttagataattagttcaggaaagtcactaaaagaaacaacaataaacagtaacaacagtaaacagtaataacaacaaatacctggtaggggaagaatctgatttttcgagttgtcacattaccttatttaaaatgtttagttttcaagagactgttattacaaagcatgcaaaaaaccacttaagtatggtccacacataggagagaaagcagtaaattagaaaatgttccctgaggaagcccaaatgttagactttagtattaggcaaagactttaaatcagccatttaaaatatgttcaaagggcctggtatggtggcttgcacttactgaggagggacaattgccactgcactccagcctgggtgacagagcaagacctcatttctttaaaaaaaaaaaaaaaagaaagttcaaagaactaaagaaaaccatgtctaaataactaaagtaaggttttgtgaactatattatattagtccacttggtttgccctaacagaatactatagattgggtggctaaaataacatgtattttctcacagttatggaaattgaaagtctaagatctcttttaaatgagtactaacttctattttaggtataattgcttctgaataattgtatgttgtatagttctacctctagtgtttaagatagggtagaattcttccaccatttcaatttaaataaggaaagggtatctgaaggtagtcacatttagaataaaaataagaatttatacaatttgaccttaagttatctatgtaatggaaaaattcttctgttatgatggtaacaggtaatagagcctacatttcaatctctgtactcataaataaactgttgatccaactgtttttatagttttatctgccagtgtttcagatctcgttactaataaataaactatttattgttccaactatgtttataattttgttagccaacatttcagatctctgtactcataaaaaaactgtggtctgtgtttataatttcatttgtttgtattacagtcatagaattttatgcagtttcatatgtgattttgtctaaaaatctaagtagatcctattataacttttgaggtataatttacatacatttaattcttttaaacatacagttctgtaagttttacagatgcatacaattttgtaaaaccacatcgagatacagagggccaggtgcggtggctcacatctgtaatcctagcactctgggaggccaaggcgggtggatcacctgaggtcaggagttcaagcccagcctggtcaacatggtaaaaccccatttctactaaaaatacaaaaattaggctgggtgcaatggctcacacctgtaatcccagcactttgtgggggtgagacagttggattacttgaggtcaggagttcaggaccagcctgggcaacacggtgaaatgctgtctctactaaaaatacaaaaaaattagccaggcatggtggcacatgcctgtaatcccagctgctcgggaggctgaggtgggaagattgcttgaatccaggaggtggtggttgcagtgagccaagatcgcgccactgcactcctgcctgggtgacagaggaagacatcatctcaaaaaaaaaaaaaaaattagctgggtgtggtagtgcgtgcctgtagtcccagctacttgggaggctgaggcaggagaattgcatgaacctgggaggtggagcttgcagtgagccaagatcacgccactgcactccagcctgggcaacagagtgaaactctatctaaaaaaaaaaaaaaaaaaaaaaaatatatatatatatatatatatataatagtttcatcaatcccaaaaaggatcccttgtgcctctttatagtcaaccttttttcccatccccaacactggcaaccactaatctgttttctgtccttgtagttatgtgatataaatggaattatacaatatgtaggcttttgagtctggctttgtccacttagcataatgcatttgagtttcatccagattgttctgtgatttactgtacagtattccattgtatgggtatactgcagtttgtttattcatgtgccagtttgaagggcatttgagttgtttccagtctttggcatatatatgaacaagctactgtacacatttatatacaggtttttatgtgaacataagtattcttttcacttaggtagatacctcggaatgggattgaaggattgtatagtaagtgtatgtttacctttataaggaactgccaaactgttttccatgactggctgaactgtaccattttgcattcccaccagcagtgtgcaatttctaattgtacattgttctagttgtagagttcttgttgttccacatccttgccagcatttggccagtttttttatttttattttagacattctagtaagtgtgtgctggtatcatatatacatatatattcccacccttcccccagggctctctgtactagtctctgcttagcctaaacgaaaggatctaaatctacagaggccaacagtcccaaacttttggaatctcctctgaatgcagctcattactgtttactagattccagacttcattcagattttactactttttctactaatatcttttttctactcaaggatccaattcaggataccactttgcatttatatagtttaatttttatttctggctgtaactaacatgttattggtttataagatactgctactagttttggttctgttttttgcaagactattttttcagttcctatctgtcccaaaatgctttatatgtcacataatttttttggggggaatgaattcaatttgtgtgtcatcattttgagttgcattcagaggagattcttaaagtttgggactattggtctctgtagattagatcctttcatttaggctaagcagagactagtacagagggcccctgggaaaattgtttcaattaagagtctttatcaagaaatgattaagttcctaaattttacccttatttactttgttgcttgaagttggaattaacaactttacttggttaaattagctgagcttttatagtttcattctgtttgatctgtacatttttgtaaagggtagttaaatggcatattcaacactgacatgaacttttgatgcagcagccaaaagtaattatgatttctttcagaatatgtctttaatacctggcatattttatcctggattctatttcagtgtttttcttccagcttgaaatattctatgaatatgtttagaaagaatttcagggctctattcaagacaaacaaaaaagaaatcccaaagaaaaatacatgcaaaaaagtaattgttgagttagaaaagtcacgtttttccaatgaaaaaaatttctgatcatttagtaccatattatgatgtgtttatcaacgttcttgatatagtgctaagcacagtgttacaaagttaaaaattaaatatttagtaaatgatttatggaggagcatattactgtataactattacatgagagaaatgcaaaataggaacttcaatcaaaacagaaaaatatgagctcagtcttgaggcatagtttacgtaagattgttatttaagataaattggaaaggaggacttttatatatttcaggtttaactctagcagtaatttttttccctaagcagaacacatcaaacagtatggtgaggctaggcgtagtggctcacgcctgtaatcccaacactttgggaggctgaggcaagcagatcacttgaggtcaggaattcgagaccagcctggccaacatggtgaaaccccatctctactaaaaaatacaaaaattatctgggcgtggtggtaggcgcctgtaatcccggctactcctgaggctgaagtaggagaattgcttgaacctgggaggctgaggttgcagtgagctaagagtgcgccattgcactccagcctgggtgatagagggagactccatctcaaaacaaacaaaaaacagtatagtgaatgtatgcagactttaagtgctgtcttgcaaatactagtgttgagtttgttaaggcgttggaaagatcttgtaagatttctcaagatccatgaagtacctgggactgtcagtgttattgttacctgggtatttcttccactatataaatttaaagtttatcccagagtgacagcaggagaatgctaactttggaattatgtaacactttcattagagaggcaaacttgacaattatttggaaagtttttaagtgttttatgtttattatttttaatgtctggaagcatttttttttcagctgtatgtacagttgtgttctcttatcttatttacatttctttctcttttttttgagacggagtctcactctgtagcccaggctagagtgcagtggcatgatctcggcttgctgcaacctctgcctcctgggttcaagtgattcttctgcctcagcctccggagtagctggaattacaggtgcccaccaccacgcctggctaatttttgtatttttagtagagacggggggtttcaccatgttggccaggctggtctcgatttcctgacctcaggtgatcacctgctttggcctcccgaagtgctgggattacaggtgtgagccaccgcacccggccccttacttagatttcttcatttcccactttcgttttcagtttgtctgtttcattcagtggtcaggagatggtcaacaagcccaaacagagaggtaatagcaaaaccaagcaaacaaaaaacataaactttgctatttgtattagtttcttgtggctgccataacaaattaccccaaacagactttgaggcttaaaacaacagaaatttattctttcacttctggaggccagaagtctgaaatcagggtgttggcaggactgaacttgctccagaggctttaggggcaatcatcccttgcctctcccagcttctggtggctgctgacattccttgaccgtaaccctccagtctcttcttccattttcacattgccgtcttctctgtatgtgtgttaaatgtctgcttttctcttataaggatatttgtgatggcgtttagggcctatgtataatctcatctcaaaatccttaataacatatgcaaagactgtttttccaaataagtgaacattcacaggatctgggtattaggctatggacccatctttggctagaaatctatttcatgataactgtgtgtatatgtgtttgggaaaggggatttcccccctcctctcttcctcttctaccccctctttcccttccttccttctcctcttccctccctttctcctttccctcccaccctctttttttttcttcttcttctctctcttttttttttttttttaaatagattgggtctcttgctgtgttgtccaggctggtcaacataccagattaccagattactcctgggctcaagggatcctcctacctcagccgccccttcccactttgaccccagccccagttaaaattacttgttttggccggccatggtggctcatgactgtaatcccagcagtttgggaggccgaggtgggtagatcacttgagctcaggagtttgaggccagcctgggcaacatggtgagactgtctctactaaaatacgaaaaattagccgagtgtggtggcatgtgcctgtagtcccagctacttgggaggctgaggcaggagaattgcttgaacccaggaggtggaggttgcagtgagctgagattgtgtcactgctctgtttcaaaaataaataaataaataaataaaattacctgtttaattaacagtaagtcaggctgggcactgtggcttaagcctgtaatcccactttgggaggccaaggcgggcggatcacttgagaccaggagttcgagaccagcctggccaacatggtgaaaccctgtttctactaaaaatacaaaaattagccaggcatggtggtggacacctgtagtcccagctacttcagaggctgaggcatgagaatcgcttgaacccaggaggcggaggttgcagtgacccaggattgtgccactgtactccaggctaggtgagattgtgacactgtactccaccctgtctcaaaaaatcaaaaaacaaacaaacaaaaaaacccagtaaatcaaagtctgtacattttaaattaaggacttacggttataaagagaaatcaatttgtttttgtgggtttttttgctagcctgtacagggagttaatacgtagcataaaaagaatgtcagggagctctctgagtctgaatcttttctgattctgagggctgccagattcagaagtagctctttgttcaactaagctctttattcctctaaagaaaaaaaaaaaaggaatgttatttttggatttttaggaggtccttaaagtgccaatccatacattgaaaaagaaattttgagtttaaatttaaaatatttaaaaacgttaagaacatgatgttatatcataagatcaaagtaatgtaacataggatagagatgtaatgaaagaaaaggaataagtagcctaaggtaataatattaggaatgtaattttttttttttttttgagatgggagtcttaactcttgttgcccaggctggagtgcggtggtgcgatcttggctcactgcaatctccacctcccgggttcaagcgattctcctgcctcagcctcccaagtagctgggattacaggtgcctaccaccacgctaattttttttatttttagtagagacggagtttcaccatgtaggccaggctggtctcgaactcctgacctcaggtgatccacctgcctcagcctcccaaagtgctgggattacaggcataaaggaatgtaattttaaaagggagggttttatgctcaattccacataaagaggacaaaaaacttcagacaagggagttcagagttttggattccaccactgtttctgctgcttacaggttcatgaggcagtgccttctcttttgtttaatttcctcaactttaaaataaggattacatttaatgatctgtgatactctatcctttgtagcatcttttgttatatattttcttgcatttccaagagagaatcgtgtctgtccaatagagtgaaaccaaatgtgaagtctcttccaatagcaaattctttaactattggaagttcgttgcttttgcttagagctgtaaaatgaaccaaccctgagtttgtgtacagtgtctaaataacttcttaggaaagagatgacacagccagaaaatcaaatgaatctttctgcctatactgttgtcacaaacagggtaagattttttaggtaaggcaagatcactgtgatttgaaatgcttttccctcaaaactgaaattttttttctaatggaaaaagttgggggcaagaatgaagaatttgtgtctaattttagcttaatgtcttgaacattttttatataagcatttaaaaatatgtatttaaacattttactatacttttaaatgtaagctttgtatctgcttttgattcttatcaaattatatgtaagctattattaaactaacataaaaacatgtattcaccttttaaataagcttgtattgaaatagtttacagttacagtgtagttaaacttattgttcacatgttgtttgtttctcatttttcgtttctgtagacaacaaacttatactatttttaaaagtagagtttgcttctttcccccctgtatgtaattcttgggtgagcacctaagaaaaattattcagattaggctgtggccaatcttatgacctcttttatactttatccaggaacagtctgaagacacatatgattttacagctgtgcctgactgaatatgtctttatcttctcataacccagataacacttggttttattgtttagattttttttggtagcttaatatgtatgaagtcgtatcttaagaatattgcaatttatatttctccaattagtagtgagacagtcttttttctcaagtgccgattgaatctctgtggtttaaactgcctgtttttatcctttgacaggtttatgagttagtcattgtttgctccctaataatagatgatcgggaaatgttgaattggtttggtttatattataaacattgttttatttatcataattcttgcagatattgcctgaatttataatattttaatcttagatttgtttttttcattgcatgaaagtttattttacataattggatttgtcaaattcttgtttatgctttctttgaattgaccataaattcatctcttttccatagtgagataagcttactgttctgttttctccaaagttttttgaatgtttagttttttaatatatttataattacttacagcatatgttgatgtggatattttttgcatgttggtattcagtttttctgacaatgttttctaaatactgattttttctccatttatttcatattttaaatactttatagatttgatctttttttggcatttctaatctcttagggttttttttgtattttttattgtaaaatatacgtaagataaaattaactgttttaaccatttttaagtaaggtagtacccccaccatctgtagttttgcttttggcggttttagttaccttctatcaaccttggtctgaaaatattaaatggaaaatttcacaggcaaataattcatcagtttaaaattgtgcactgatctgagtagtgtgatgaagtctctctccattttgctctttcctgcctgggtcatgaatcatccctttatccaacatattcatgttgtagacacttcccgcctgttactcacttaggagccgtcttggttatcagatcatttgttgaggtatctgcagtacttgtgtgttcgagtaactcttttttgttttttttttttgagacagagtttcactcttgcccaggctggagtgcaatggcgtgatctcagctcactgcaacctccgcctcccgggtcctggttcaagcagttctcctgcctcagcctcttgagtatctgggattacaggcatgcgccaccatgcccagctaatttttgtatttttagtagagatggggtttcaccatgttcgccaggctggccttgaactcctgacctcatgatccgcccgcctcggcctcccagagtgctgggattacaggcatgagccactgcacccagcctgagtaactcttattttacttaatggccctgaagagcaagagtagtgttgctggcaatacagatacaccaaagagaagtgcattaagtgaaaaggtaaaagttctccactaaataaggaaagaaaaaaaatcatatgctgagattgttaagatctacggtagggctgggtgttgtggctcacacctgtaatcccagcactttgggaggccgaggcgggcggatcatgatccagactatcctggtcaacatgctgaaaccccgtctctactaaaaatacaaaaattagctgggcgtggtggcacgcatctgtagtcccagctactcaggaggctgaggcaggggaatcgcttgaacccaggaggcggaggttgcagtgagctgagatctcaccactgcactccagcctggtgacagggagagactccatctcaaaaagaaagaaaaaaaatctatggtaagaactaatcttctgtccatgaacttttgaagaaggaaaagaaattcatgctagtttttctgtcacacctcaaactccaggttttggccacacagtgtgtgaaaactgctgagttaaaatttatcataggtatatatgtataggaaaaaagacagtctatatgggtaccatctgtgggttcaggggtcaactgggggtcttgcagtgtatcccccccttggaaggggagactactgtatacaattcagtggaattaagtacatttacaatgatctgcagtcatcatcactattatctagtctctttatttaaggtattttcacttcaacctgcaacattattgctgttactcttggacaaattgtttaaatctctgaatcccagtttccttgtttgtagcatgaggatgataataccacctgcgtcttagttgtggagacaaaatttgatgagatagtgaatataaaaattacttggagctggatgcagtggcacatgcctgtagtcccagctgcttgggaggctgaggtgggaggattgcttgagcccaggagtttgagaccagcttgggcaacataataagaccctcatgtcttaaaaaaataaaaaaaataaaaactaaaaactttgtgtattatatatgctcagtaaatgatagttctcttatctttcccactattattggttttaaagaatggtgtagacaggttttccttaaatggcctctgttgttctcctttctcccaaaatattcattattaattttgtctaattttcattaagaaatttgtaggtattggagtaaacctttgttcacttctttttttttttttgaggcagagtctcgctgtctcgcaggctctatatatttatatatatatatatagagagagagagagagagaggatggcttgcttccctctctacctaactgcatgttgaaaaataagcatttgttaatcttaaacatctgtcacatgagtcatacactgggttgttttttatatacgtgtatgcacacattatttgaaattgaaagcaacgtctcaatggatttgaaactattaaaggctattgtctaaaacgtgaaaaatgtataactaaaaataaatgcacatattaatatttaaagtgcataattaagaaaacctattggtgttttgtttttcttgtataccaataattaagccactactgttgacactatttggctttctgttttaacattgaatgagtgaaagtacttcttatatttatgaatttgctgctaaaatcttggccaaaaaaaaaaaattgtctaaaatgtgtgggtgaaaaatgttaatcatgtatgtttctaccttcccccccaaagttggacaccaactatataccgtaggttgcttaaggtgatttcactattgttaaatcaataagataaaaatgaaatagttgtgtatatgcaacattgtgtacagaggagataatgaatagtattaaacgttctcatcttcctttaccttttgttccctaatacctattctaccttttaaaatttcagacttcactgctctttgaattcataattcaaatttgcacattattattattggaaaatcatatctaataaaggttttaggccggatgtggtggctcacacctgtaatcccagcactttgagaggccgaggctggtggatcacttgaggccaggagtctgggaccatcctggccaacatggcaaaaccccatcgctacaaaaattaaccaggtgtggtggcgcacacctgtaatcccagctacctgggaggctgaggcatgagaattgcttaaactggggaggtggaagttgcggtgagccgagattacgccgctgtgctccagcctgggtgacagagcaagatgctgtctccaaaaaaaaaaaaaaaaaaaaaggttttagttatttccccccccaaaaaaaattaaaaataaaaaaaaatatatatatatataaggcactttggaaagtgtagtaaataaacttaaaatacaatgtagtcagtgagcaaatctatggactaccttttttctatgtgggactgtgtcatagatatccagttaactcctgaatatctctgtacatacttagctgcatgcaaattctctttctaggacctataaatcagactttgccttacttagacacttcttttgaagttgtaattaagagtgatatatgccttgttttcatggaaaacaatttgacctttattctgtgctttttttttttttttttgagatggagcgttagtcagtttcctgtcgcccagcctggagtgcagtggtgcaatctcggctcactgcaacctccgccttctgagtttaagcagttttcctccctcagcctcctgagtagcaggaattacaggcgcgtgccaccacgccagattaattttttgtatttttaagagagacagagtttgaccatgttggccaggctagtttgaaactcctgacctcaagtgatccgcctgctttggccttctaaagtgctgggattacaggtgtgagccactgcacccagcctattctgtgcttttaaacaaacagaacacacacacacacacacacacacacacacacacacctacatatatttaatttctcttcctaagcctaagagctttaataacacattgaagcaacctaatttcttgcttatggccatttacatttacagggtacatagtatgttgaacttgggacaaaacagaaactatgaggtaggaatctaatttgaattttgaaataaaatatttgttactaattatttcccttctaacttctaaagagtaaaaataaaatttatggctgccatattacagaaagatcctgcttttatttttaagcatgcaaaatctcaatagtattcaaaattgtgtggctcttgaatcaaaccaaagtttctattttttcactgtcagcattcacaggtagagaagtgtaaagtcttaggaaatactatttctattctcaatttaaaattttctcagaattctgtccatgaaggcaaatgaatactgacaagctctatttccaaaaaaggtgataaaacaagtgtatttagaaaccagtagtaagaattgaaattagaaaattgtgaaaagacattactttccaaatgttctaaaggtacttaaaagattaactcggggcatgtcttgtaatttcatcagctgtttgactaagttttaatttattttaattacattaaaaatccacttttcacttctgtgttacaactgttgtattacttgatattttaaaagatgaatctcactgaatgtaaaataatgtcaggttacattaatggtaaaaacaaacaaacaaacaaaaaaaaaccgttgaccgggcgcggtggctcacacctgtaatgccagcactttgggaggctgaggtgggcggatcacgaggtcaggagatcgagatcatcctggctaacacggtgaaaccgcgtctctactaaaaatacaaaaaattagccgggcgtggtggcgggcgcctgtagtcccaactattcaggaggctgaggcaggagaatggcgtgaacctgggaggcggagcttgcagtgagctgagatcgcgccactgcactccagcctgggcgacagagcgagactccatctcaaaaaacaaaagacaaaaaaaaaaaacacgttaaattctagaactaatacaaggaaactaatactaagatttttacagtaattctgtacttcttttattaccaagttttgcaatattgtgtcttagttatactgtattttcatctcttgctagtaagtatgacttttgattgtatagcatgcaccacttgtggaaaatggtatgaagtcttaataaaagttttaaacattgataaatgctgggactgtgatgaatacttgcattcttatatttagtatgttctgatatttcaggtctttcagggtacaaattattggaaggcaggagaatactgtattgatggaaactagtatttagatgaatgttttggtagaattacataatttgtggtcattagtgcattttatacagaatgtaccagaatgtatgtttgcaaacttcccacacattgtatgttgccagtagaatcccgggggattttgtaatctattctttccttgtaggcagctttttgttttaaaatgatcaaaattattcgtggtcattgaccagttattttgagatagcaagcctggtttttaaacttttcttttcttttcttttttgagacagagtctcactctgtcaccaagctggagtgcagtggtgcgatctcagctcactgaaacctccgcctcccaggttcacgcgattctcttgcctcagcctcccaaggagctgggactacaggcttgcgccaccacgcccagctaatttttgtatttttagtagagacagggtttcaccatcttggccaagatggtcttgatctcctgaccttgtgatccgcctgcctcggcgtcccaaagtgctgggattacaggcatgagccaccatgcctggccagttcttttcttctaaatgtagaaattatttgtgtactttttattctcctagattgaaaagccaagaagacagagaattttaaagatggaaacaacaaagggtgcttattttcacagaatagatgtagaaaggaatgtctttaaatgtttcccttaaagaaggttttcttgcagcttacagaatttatgtcaagaaatagtagattcttctttttctattataaaatcaatttaatattaccatatttctaaaaagcaaaattcaatattttaacatttattgataatttatatccccaccatttatactaatgtttctatgttttttcttttaaaatgattcttcattattcaacttgatagagcgttttcttactttttaaaacccatgaccccttttgacctgtaagtagtattatgttctcctttaatgtaattcagatttttaaaacgaattagtttttgtgtttaaaaacaaaattaaaccacattattgagtgtgtatacacataaatattttttaacaattattcttaccttcctcctatcagagatgaaatttataactcttcccccatggtggagtggatatcccttttatctcccttgctgaaaatatactagagattgtagttttatagtcatggccttcaattagggaaaacatgtaatgttgtaagttttctatggatgagaactggtcacacaaaaaatcaacaacttggccaggtgtatgcctgtaatcccagcactttgggaggctgaggcaggcagatcacctgacgtcaggagttcaagaccaggctggccaacatggcaaaaacccatctctactaaaaatacaaaaattagccaggcatggtggcgcgcctgtagtcccagctacttgggagcctgaggcagaaaaattgcttgaacccgggagacggaggttgcagttagccgagattgcgccactgcactccagcctgggtgacacagcgaaaccctatctcaaaaaaaaaaaaaaaaaaaaaaatccaacaaatgaggtattgaaggtattccatttctctaatgatgtggtcctattttgttgtttctaatgggatgaaataatatatgtacataatgtacatttagacagtataaaatgaaaaggattgtcccttaaagaaaagatacttcaatttgaaactaagacataaactagtaaaaccaaaaatgtttgatctttcatagctgtgaatcagttttaggtcacattgactgtgttgttctaagctgagcaaaacaagtgcagggaagatagctcctatgagctttacttattgcactctgtaattctgtatcactagttacctgtgtcatgtagtaggagaacttagcttttgaggctctgtgtatgagctacagtgagagcattgagcatcaagtgcttctgacctttaaacttcttttttcttttgatattctaaattggggtagggaataaagctgtgttagagttggacaactttgcatctaattgtaaccttatgtgtgttttctctccttttcacattctggagtgtggctctaaaataaagttgtgttgtattgcaacacgacagagtaatagaagtagagtggtggtatactggcataacaagtttttggttttcttgttatttgtctattttcagtacttgtgtgataagattatatacttactttagctttgtatgtgagttaggtacagtggttggtagaaaagctaaaaacagctgtgactttaattaaatatacaagcaatcacatcttttgggagaagtgctggtttcacttttgttagatagaaatggagtatttcatttttataatgtatgcagctttctaatttttgtctctttgtctcctgtcagtaggacatggtaaggtggacttagaatcccatttttccttttttgtttgaaaatcaggacagaaagagcagggtctgagaacgtaaagattttgcttaaataattgggcagtacagttagtagaagttcattatttcagaattaaattaggtcctatctttggatgattattttctttagttctaaaagtcaaggtttcactctacttatttatttttattattgagatgcagaagaattgagttttccttgaaattgatgacatatagacagatagttggttgtgaatgcatttagttgatattccggtttgtcctatttaaagtgattctgtgtgtctgtgttaacagttatgtaaatgttccacattaaagcaggttagatgttatcataacttgctgacttgctaggccagtccctatcatttttagtgtaactctaatccttaaaaaaatattttattatctgcacgtggctgtcattgtaaaatgttcaatgcattaggcaccatagtaaccagcagaagtggttccacatgttggcttttgcaaggtattataaaagtcattgtgtacacctctcttgatttggtgtagcatgtcatttttgaaaagccacgtgcaggtttgagattttgtgattggaactcacgtagaaagcttggggtagcaagatactaaaaaatcattctctgatggcctcaatgataatactttaagagtgtataaagctttgaatcctcctttttaaaaacagattgtgaaaactgctgagagagacttgcaatccagtcacataagtataataaagaaatattggtcctcatggaagaagagcaagatttaccagagcaaccagtaagtatttcctttaacagtttaaagttgattgtagaagagctaatcttaagagattttaattattattcagttatagattccaaattagaaataaaaataaggaaaagattccttgtttcctttcaagaaaacaatgttatatttttctaacttaattctaaggagtctaaggaaaatttagcattacgaaatgaatattgcatttagaaatgtcatttaaaaaaataagtggctagtgttacagtttttagaaaataaaagaggacgtctctttactgatctgacagtatatcaccatttctaccagaaaatttagttttgtttttacctaaatttccttgagagttaattttttaaaaagtagtagtagtgaggaagttataatttgaccactagctaattcttaaaaacagataaaaccctagagactatattgaattcttaatttcttttaaatattgaacataataaaataattttaaatgtccccaggtgatatgggtttatcttctttttggtttttggcccttaatatttaaaaaacaaaagcaatagtgtcattcttttaagataacttttatgctagagggtcttttccttttgtcttcagtttctttctctgaagtttggtaaataccgattcaatttgctatcctgagtgggcctcttacatttcatattaagagaggatacagcatggtacatgtttactttatgaaaatctaacctataaaaatttgaattttgaaagcaaataataggatatgtttttcgtgttctagttgtattctttaggtatactagctcccatttaaatgataaagtcctttaatatattttaaatatttttctttatattgagaaatgcatattgatgattactttgtcattattcttctagccctctcagttgaggtaagtataaaactaggaagacattagcaactggtaaaaagaccttttgaaacatttgaagtgtgatccctatccctggtgggactttaattatcagggaaatggtagggttaaaaattatcttgagcagtgtgtttaggatttacactactggaacaaatagctgaattatagatactatatgtaccaggaaaaattatgccattgagtttttaatgtggtaagacaaaggtctagtcatatttttaaaagacttatgtaagtgttgacatactgttgaaatatgggtattgttagttactccttacctatttaaggtaatgagaattgtgaggctgacctgctaacaagtcatctatctcttctgccctgcttcatttccttgtcattctcttgaacttctgtaacatgatgtgcaaaacctgattattacttcagagaaaggtaagaaattgaagcactttaaaaccaaaatttctgctgactataaatggttgtcacagggcattatttccttattgatttatgcccagatcttaatataaaaaggtgattgaatgacgacatggagagatcagtgccactgaaagaaaagttgagtgtttactcatagttccccttgaaacaagaggcatagcatgccacacgggggaagtaccactgttggtcaggaggcaaaaaagagtgggaggaaggcacgggccacagacttaatgaggtttccacaggaaaagcaaggtaggcagggtaaacagcttagcgttgactagtttgaataattcttcaggctttgtggcctgtggactatccctggttttctggtggtactttgtcctgggttgatttatgatttagggcaggagaaataggggcttagtgtgtgagagttagataaaggaggtggttcagagtatgggcactggatctcaggggagataaaaaacaagtttggccttgagtttggctctgtaattaatggatgtcaaacagacaaatacagaatctatgaaaacacaatacttattaatgtttaaaatagaacaggaagagtaatgacacattttgaggtaaaaaaaaaaagcttttcacaggctgtagtggagatctaaaatatgagtggaaagaatggtcccatcccaagttgatgataaagccaatatttttaatcctagagatgttactgatggtcgttattattgaagttattttaatcccattgtctcttcttgactcttccttattgaattatcccttctcttatttctccactaattgctagctctacctcaagattttgttcagatcggctggacgtagtggctcatgcctgtaatcccagcactttgggtggtggaggtgggtggatcacttgaggccaggagtttgagaccagcctggccaacatggggagaccccatctctactaaaaatacaaaaattagccaggtgtggtggcacttgcctgtaatcccagctacttgggaagctgaggcaggagaatcgcttgaacccaggaggtggaggttgcagtgagccgagattgtgccagtgcactccagcctggacaacagagtgggtgagactctgtctcaaaaaaaaaaaaaaaaaaaaaagattttctttagataactcacaatgcaataaattttaacttcagattctttcactttccctttattgcttatcaatcttcaactgagttgtaaataactttgttatattactataaatcaccttctaaaaatgcaagaatcttatccacagatgaggggatccttttgactgattattgtacagcctctacttggagaatagagtataaagaacagcagtggattgagaataagaaatacctcacactacagtttacacactgagagtccctgaagaagtaacatcatcaccctttgataccttaattaaaaatcttagtctttccagctttccgtcatatactttacctatttatagcctaaatcttttaagctatcaataaagatgttgagtgttcttagagaaaatatataatagctccaggtgattgtcatatcctttctaggtgtctacaaaggtctgttcagtaatctgttttagaacactgtcatcaatcagcattaagttagcactagtttatagtttccagcatctaattcctctctaccatcacctttaaattaaaacaaacaaacaaaccaagtagtgaaacatttctttttgttttgtttgagacagggtttcaccctgtcgcccaggctgtagtgcagtggtgccatcttggcttactgcagcctccgcctcccaggctgaagcaatgctcccacctcagcctcccaagtagctgagactaccagcacacccaactaatttttttgtattttcagtagacacggggttttgccctgttacccaggctggtctcgaactcctgggctcaagcaggtcccccaccttgtcctcatttctttatattctgtttcaagcacctctcttattctctgtgatttttcagagatgataaacactggtttagcaatcatgtttgttaagttacaggtctatgggataaagcttctgtgaatctggagggttagaacttatttaaaataattgaggtgcttgcttataaatatgggaataaactctttttgaaaaatttaggtatgctattgtttacattttgtagattactcttcttgatagagaagacaaaaagatttttttgcctccatcagaagtcacacctaacatgcagtggtagaacaggaagttgtctctgccataaatatttacctctctaataatttggaatgcttacctccctctctaggtcctgctttccttatgttaagttcttgaagtcaaattaataattagatagctattagtaagcacagtcaatgaaaatggcattaaattgttttttgtgtgaaatttcatctaggttatgatcaaaccctttacccctctagcatatggaatatgactttttagtaaacagaacagtgtccttctgtttgttggacagtgttggataaatcttgacataaacatcctttttatagtctccatgacgacttttaccctaccattatatttattattgccaagattacaatttacctagcactagcatgcttttgcctcttgtttaaaccttcatagccattacttgtaagtcatcacagagtaatttcagaatgacatttgagatgcttaatacaattttcttaactagagagtcctgtttcttaagcctgtcttgaaatttctgggattcaactttgttcttgctgtctatggtaataacactaaaatttaacaattacatagcgctttgtttttcataagcagttcactcttttcctgtttaaatttcatctttacatattatgttaacagtgcacatccttaagtttattcagccagcatccttgtactgttaatgctgctgtttcctgctgttgaaacatgagccctatgaagtaggtagttgtatcttcttttttacaggtgaagaaacagatacagaaaagacacgcagtgaattaactctcagaacttagccttgagcctggatattctgaatttgtatactgggttttttgtttccttgctgtgttatatttaaagtgtgattatacattgtagcagaagcaaaaatagaatgctgatttatgaatttgtcagtgcttctttctttttgtgttatcattagccattatatgcccataggattatgtcattttttaagataccagctttattgacatgtaatttacatatcctacaattcacccttttagcgtatacagtgcagtagtttttagtctattctaaaatggttttgtaaccattaccagaataaattttaaggcatcttccttttttctttttctgtttttttttttttttttttttttttgagacggggtctcattttgtcacccagactggagtacagtggcacaatcgtggctcactgcatccttgaactcctgggctcaaacaatcctcccatctcaccctcctgagtacctaggattacaggtgtgagccaccacacccaattgttttttaaattttttgtcgagatggggtcttactctgttgcccagctggtctcagactcctgaccttaagcaatcctcactctgttgcccaggctggagtgcagtgtcactatctcggctcactgcaacctccacctcccgggttcaggtagttccctgcctcagcctcccaagtagctgggattacaggcgcctgccaccacacctggctaatttttgtatttttagtagagatggggtttcaccatcttggccaggctggtcttgaactcctgacctcgtgatccacctgcctcagcctcccaaagtgttgggattacaggtgtgagccactgcctccggcctatatttttacaagtgatgagagcatacatattctcctaagagttttatagctttagcttttacatttagtgctttgatccattttcagttaatttttgcatatggcttgaggtacgagttcagctttatttgttgaaaagactattcttccttcgttgaatcatcgtggcacttttgctgaaaataatttgactgtaaatgtggtacccttcttgaaaatcagttgacccaacaaatgtagaggtctatttcaggactctcaattctgttccagtgatccatatatccatccttatgccagtaccacacggtcttgattactctagctttatagtaagttttgaaattgaaaaatggggctgggcgcagtggctcatgcctgtaatcccagcaatttgggaggccgaggtgggcagatcacctgagatctgagaccagcctggccaacatggtgaaaccccatctccgttaaacatacaaaaaaattagccaggcatggtggcacgcacctgtagtcccagctactcgggaggccaaggcgtgagaaatgcttgaacccaggaggtggaggttgcagtgagccgagatcgcaccactgcactccagccagggtgacagagtgagcctctgtcttaaaaaataaaaataaaaaagaaatggaaaaatgtgagtcctctaactttgttcttttttttttttttcaagattgttttagctattctgggtcactttcatttccatatgaaatttaagatcaatttgtgaatttctttaatgcagccagctgggattttgattggattgactgtagaccaatttggggagtattaccatctttacaagatgaattcttctttccctggatatggggtgtctttgcatttatttagctcttcttaaatttcttttaacgtgtattgtacttcttcttctgttaggtttattcctaagtttttttgtttgtttgtttgttttagacagagtcttgccttgtcacccaggctggagtgcagtggtgcaatctcagcttactgcgacctccacctcccaggttcagacgattctcctgcctcagcctcctgagtagctgagattataggcgtgcaccaccacacacagctaatttttgtattttagtagagatggggtttcaccatgttggccagcctggtctcggactcctgacctcaggtgatccacctgccttggcctcccaaagtgctgggattagaagcgtgagccactggacccggccatattcctaagtattttattccttttgatgctattgtgaatggattttttttttcatttttgaattgttcactgcaagtatatagaaatataattgatttttgtatgtttgtcttgtattttgctgccttgctgaacttgtttatcagttctagtggtttcttaatggattcgttaggatttctgtatacaaaattatgtcatgcaaaaagagattctgattttttcacttttaaccctaacggagctttttcagctttattgctttcttacttcctggcagcttgtattactgtcctactactgtcctggtatggccccaattccttggataccagctgcttgtataatctatactggttttgttaatgaaaattgttctctgtaggactggttgctacttgaatctttgctcactttgctgtgtagttttcagtattcattattgcaagtactatgttactctgtaaactctccagaaaattgttgctcaatctttgctatttctcttaacaaccaggaatcattttctgtcagtttctagcttgtattgtttgaactgatacttctataattgagtaaaatctgtctgtcttctttagttaatttacctgcctctactgcctagttagtacatgcttcctatccctgccttagaggggggcataattgctcaaatcaagacaaacaatgggccatatgaggttaaaaacaaaacaaaacaaaaaaaacattgtaacaccctttccttccccagacttttctgcttggtagatatgactttagatacattttctccctttctatttatgaatatatactctgcactgggttggcacggtaataaattaaaaatgaaggagcgtaaagaagcataattcttccttgaaagtaaataaatttttggccaggcgcagtggctcacgcctgtaatcccagcactttgggagaccaaggtggacggatcacttgaggccaggagttcgaaaccatcctggccaatgtggtgaaacccggtctctcctaaaaatagaaaaaatagcaaaattagctgggcatggtggtgtgcacctgtggtccctgctactcgagaggctgaggcacaagaactgcttgaacccgggagacagaggtttcagtgagccgagattacgccatggcactccagcctgggtgacagaacaagaccctgtctcaaaaaaaataataataataataataataataataaataaaaagtaaatttaaaaatgttgctccaggaccttttttttaaatccttttttcttttggagttgattaactaaatttgttgctctatacctctaataaaatgaagactatgataagttagactcctcagtgctctaattttctttgtttaaattactgtttgaagagtatagactgttttggttactcagccaaccagctcgtaattacatttctttgatagcaaagagtctttggatgagctaagcataaattcatctccactattggaagaatatattattatctgaccatatgtaactactatcatctttaggtaggaagggcagaacattttataaaaaaaggctatattttgtcatttgtgaaattatggcaggcagataaactagatagttgaatttttcttgtctttagccttatagtttccaggcaaaacactgttttcctatattatctaggtcagatcatatttccctcacctctttcagtgagatagtcgtatacattggtaatacagttagatttttttgtcacagtctgcatactatcctggaatccctcaacctcctggttgttttatggtgtcttttatcatatagaagtttaaaatttttgtgtaatcatatctattttctcctttatggcttttggatttaatgtcatgcttaatcaggatttgcccacctcaaggtttcgttttttgtttttgcttcaaatgctttaatgtaatttttgtttcaaatttagaaatgtttttttaaattgcctttgtttctttattttctcctttttggtaactatgaaaattaagagaacattgaatggaacacattttgacatgccataagcaaggaaccaagaatgtctggtcatggttgtgtattctcatgaggagtatatggccacgacaaattttatggggcttgcctgtattatttaccttgtctgaaatagtcaatgtaatattaaatatctatgattccacctgatacgcttgcttcaaattatctaggagagtttctgccttcttctattagcttgaaatacttttaaatattcataatttgaatggctaagcatattagacatgtttctactacaaccagttctaaccagagagttctaaaatcagattctctgtaatatgaaaacagaaaaatccattagtattaaccattatctttcatttgtggattcttacactgtttcaatggaagtgccttctccccagaaggaaatagaaaatgtgaaatatgaaaagaaaaaatacagggttaacaatattttctaaattactggtaacctgataagaattcatattaatttttgacactaaactaacttaagtataaagccatttttgttaaataaatgagtagatgatacttagattcccatctttactgtttgtttaaatataatttgcctgttacagtataaaaccaactagtttgtatcaaagcttggatactttatcctagtaaacattctgtctaccttgagtaaaaattctggtaaacagtttttttttaatcagaagaacacttttttcattaaaaagaagagctccatttaaaaaacaaacttcatttctagctctaaaatataacaagggttaattaaatctagactaaacaaaattaaacagttatcctgtaatagttaatagcctgttgtttgagtagctaaatgatttaaaaaacagatcaagtacattgatacctttgtatatttatttttgcaggtgaaaaaagccaagatgcaggaatcaggagagcaaactataaggtatgtaaagtttgctttctttttaatgaactactcataagttttgtttttttttttcacatgctgattagcgtatgggcatgctttgccctctttttggttcttaccatcagctgttacattttgaaattatttggtttaagattaaaatttcctttccaaatagttttttcctgaaacttgtgcactgatttgttcttatgcattcattatttattcaacaatatgtaccaaactcatgttgtatatcaggcactgtgctacatagaggagacttaatggtaaagatgaaaagcaccatattcttcagtcagacgtacaatatacagaataggaagcataagcgaaataaataaaatccaagagatttggtattaattaccaaatggttatgaaatgacttagtcattaaccccactcctcttatagaaaagaggaagcttgcgcctggcacggtcgctcacgcctgtaatcccagcactttgggaggctgaggcgggcagatcacgaggtcaggagatcgagaccatcctggctaacacggtgaaaccccgtctctactaaaaatacaaaattattaaccgggcgtgttggcgggcgcctgtggtcccagctactcaggaggctgaggcaggagaatggtgtgaacctgggaggtggagcttgcggtgagctgagatcgcgccactgcactccagcctgggcgacagagcgagactctgtctcaaaaaaaaaaaaaaaaagagaaaagaggcagcttgtttgcacctcacagtttggcttcttcataccatggttttcagttttccacagttcttaccttctgtcgtttgtgcaccaaccatatgagccagtaactgcatcacctctaccacattaatttcaagaatcctacacttttacctccacacactatcatcccggctcatttattctagaactgccatgctagccatatgatgtcttaaactatcaattaaatcatctgtcatcttttcaccatcaccccttaaaaagaactttagtttcttccttataagagaccaacatggcggaaccttgtttctactaaaaacacaaaaattagctcggcgtggtgacttgagcctataatcccagctacttgggagactgaggcaggagaatggcttgaacccacgaggcggaggttacagtgagccaagaatgcgccactgcactccagcctgggcgacaaagactctgtctcaaaaaaaaaaaggaacttaactggccaggtgtggtggctccacttttggaggtccaggtgggcagatcgcttgagttcagtagtttgagaccagcctgggcgacatagcaagatgctgtctctataaaaaacacaaaaacaattatccaggaatggtggtgcacacctttagtcccagctactcggggctgaggcaggaggattgcttgagcccaggggccagaagttgtggtgagccaagattgcgccactgaactccatcctgggttggtggcagagcaagatgctgtctcatttaaaaaaaaaaaaagaaagaaaaataaacttaactataagatctactgtaattagtcccttacaaacattcttaacttcctcacttttttctgtcatacttgcctagcaaaaccacaaccctgattaaacccaactatccacctattctgtacttattcccaatcacttgtacatcgtgagagaaaaacacaaaattgtgctaactgttcctagtttctattcatgataagatctaaaacaggcacttagtcccccttcctggtatgtctgatttcccagcctctaaaatcatcttaattcctttattccctccctccttgccccctaccttctcccttttccctccctttcctgctatttccattcactcagctgtggatcttgctccctagttcaaagagagattaggaacatctcccttctctcaccaaatcaacctacttaatctgcttctcttggatattgtttatctttcctctgaaattcccttgctcttatcgaaggctaacctctccagttgtttgaaagaacccatcaccttcatcttttcctgcaattatctcttcttttaccttcagcaatttttttactatgataaaatacacacaatatacaatttaccattttaagtgtacagtttagtggcactaagtacaatcactttgtcttgcaaccatcactaccattcatctctagaactttattcatctttccaaactgaaattccatgttcactaaacaatattctccactcccccatctccagctcctggcaaccaccattctactttctgtctgcatgattgtgactgctctaagtacctcacagaaatggagtcatacagtatttgtccttttgtgattcatcatgatgtctttaaggtctatccatttgtagcatgtgtcagaatttcctctttttaaggctcaataatactccattgtatgtctgttccgcattttctttatccattcatctgttgtttgtgttgttaatagttctgttgaatgagaaggaggtatttgttgtgccactttatggacttggatgttgttgggtttttttggtcattttattttagagcagttgttttttcatggtgtattcattgttaagcaaaatttatgtttatataactttgaaaataattatattttgaggcagtatgtcatttctctaaggataataatttaaatatttaacaagtgctagagttaactcactgtcttggtgctgttgtttctatttattctctagatgctcagttgagtatgtaggggatgttgctataacataatattctaggaccattgggttttaggaactggtccagtggatactggatcatagcaatatcaccaacttctaaaatataagatctacaaatagtcttcaacagtgggtataacagtgaacctcatacttaaccaggtacatgtagaagtcaaactagttattgatgtcaggaaaattctggttcagttttatgcccttcccctggtaattctatgtaagtaggtgtgagatggggtccagaagtctatttttattaactattcaggtaattataataaatcacccagtttgggaaactgacacaactattccatataatttcttgcccttacccttcaatttccataatcacatcttagtacattaagttctattacaaaaatataaacatttgagtaacaagataaaaatgaaccttacttggggatttagctttaaaattaattacaaatgaggaaaaattatttgaacattcaaaatataccattaaagctggacactgtggctcacacctgtaattccagcactttggatgctgaggtggacggattgcttgagaccaggagtttgagaccagcttgggcaacatgatgaaaccctatctctacaaaaattacaaaaattagctgggtgttgtggcacatgcctgtagtcccagctacttcggaggatgaggtaggaagatcacttgagcccgggaggtcaaagctgcaggagccatgatcgagccactgcactccagcctgggtgaccgagtgagaccctgactcaaaaaaacaaaacaaaaaccaaccaaacaaaaaatatataccatttaaaaaaaacccttattatacttgaatattagaagtcagtttcagaaatgatacgagaactttataaattttgtgctatatattttttatataagcaacatttctttttacaattttgctgtgtagaaactactcttacctttgattagtcagcattatctttccagatatatagaacctctggtacagtgtcttccacctctccctagagagtagaagaacaaagcaagcttctttctagggtgcatgaatgtaggaatgatgcctgggctttgaagaagttgtaatataataacagttacagttaaagtgtgcttactgtgttctagctttgctctaaatgtaaacttattagtcctcctgacagccctatgaggtaggtttcatttttattctcgttgacggatgtagaaagcggggaacagataagttcagtgacttgtccaaggtcatagggctagttattggcagaatagaatatgaacttgagcagcctctgactctagaatcaacactcctaaccactgtgctataatgggacataataactgaagaatgaaaagtagaggagatggaaaagagagaacattttgaagaatgaaagttagaacaatcttcattccagaatttctgtggaatctccccagcattaaactatctaacataatgacttgtcctcccagtttatgtgacttatcattctcaatttctcttaattttccttataagttaaaaaaaatgatgttgcttagtcctggctatataacaaatagaaaatgaggtgtttgtgttttatttaactgggagataagagaaatatagtagaatgaatcttaagggtttagaacccccgcttggaaacaaacgtataatttttgtttgtttgtttgtttgtttgttttgtttttgagacagagtctcactgtgtcgcctaggcaggagtgcagtagtgccatctccaatcactgcaacttctgcctcctgagttcaggtaattctcaggcctcagcctcctgagtagctgggactacaggcgtgcaccacaacgcctggctaatttttgtatttttagtagagacggggttttaccatgttggtcaggctggtctcaaactcctgatctcaagtgatccgcccgcctcagcttcccaaagtgctgggattacaggtgtaagccaccgcacctggcccaaacgtgtaatttgaaaacacttctcatatgattatggtttgtagctgatcaagaaccactgtctgaaatcaaacgtctccctaccttcctgtggtactttgggagcaaggtaacagagcactgttgcacagaatggtgactgtaataaataatatagcattgtatatttcagaattgctaaaagcatagaacttaagtgttttcacgttttttttttttttttcacaaaaaagcaaaaggtgttttatatatcaaaacatcacattgtaccccataaacatataataaaaagtggcagagcaatgttttaccatatggtgttaaagaaaaatctgacttgccagtgacttagctggaatttctgaattatataaaaactaaagggatctagagatataagaaagaacagtagactgggcgtggtggctcacacctgtaatcccagcactttgggaggctgaggtgggtggatcacaaggtcaggagttcaagaccagcctgaccaacatggtgaaaccccgtctctactaaaaatacaaaaattagctgggcatggtggcatgcacctgtaatcccagctactcaggaggctgaggcaggagaattgcttgaacccaggaggcggaggttgcagtgagccgagatcgtgccactgcactcgagcctgggtgacagagtgagactccatctcaaaaaaaaaagaaagagcggtagaatgctgagggtactagccctggcccgagctctcttcaagtagttgttaaaaatcaacaataaggatatcacgaagatttactttgcctcttacttatatagcctaggaggaaatgggtttgaactcatcactttttagcaatgcagcaaatcaatcaggggctaatgtattcattttggttctcccagtcaagtaagcaatccagatgtcagtgatcagaagcctgaaacatcaagccttgcttcaaaccttcccatgtcagaggaaagtaagtaccatattctgtgcatgattgaacagatattcctataactagtaatgcttttcttatagagttggtttttcgtaattgccttgtttgtcccaaaatatcctgaaggctctcccatccttgtttttgtgtgtgtttatccttgagccctcctgtaagctttattgacagaccagctgagaaaagatcacatggagtccactcacccaaggagtcacacgccgtgattttatttttgttttgagattggatgttttaaaggtaatagtgtcttacagaaaatcagagacaactatacttaaccatatatacttcccatgtatattttttaaaaaggtgtaacttttttttaaaaggtgtgtcttgagttctatatagtgtttcctcaaaggtgattctattctggtggttctcagacctttagcctacataagaatcatctagaatacttgtttgtaatgtagaattctagtttcacctccaaagattatcattcagtagatctgatgtggatagggaatctgcatttttgacaagttagccaggtgattctggtccattgggaaactgtccattttgtggaaaaccactctaatttgtaaagtgtctcctctaatttcttgaatttcccactcatccccaagaaaaagacctgttccctaaaatcttatactttacatacttcagggtcaggaagtaagttgagtattcttgctccttccaaataatttccttttttccttcaaatactttggttcaactgggcatggtggatcttgtctgtaatcccaacactttgggagtctgaggcaggaggatcacctgaggccaggagtttgagatcagcctgggcaacaaagtgagacctcctcgctacaaaaaataaaataaaataaaataaataaaaactttggttcatttgaagtctacatctataccttcccctacctttctatttttactttagactgtcatcctattcattctgttctttatttttttttttatgttttttgagatggagtcttgctttgttgcccaggttggagtgcagtggcacaatctcgactcactacaacctccgcctcccgggttcaagtgattctcctgcctcagcctcccgagtagctgggattacaggcgcatgccaccatgcccagctattttttgtatttttttgttgttgtttgtttgtattttttagaggtggagtttcgctcttgtcacccaggctggaatgcaatggcaagatctccgctcactgcaacctctgcctcccaggttcaagccattttcctgactcagccttccgaatagctggaattacaggcacgcaccatcacgcctggctaatttttgtatttttagtagagatggggtttcaccatgttggccaggctggtctcgaactcttgacctcaagtgatctgccggcctcagcctcccaaagtgctgggattacaggcatgagccaccacacccagccatttccttcttgtcaggatgtaagcagcatacttgctcttgtcagatatagaggctattatttgtgtttcatatgctatctgtttttaccttccccaaggactttggtactatagttttcttgccaccacttgtgtgtcatcacggtcttccctttttatccttcctgtcagtaaagaaacatcttaccattttaaaacataaacactgctcccccgacccccccctgcccctccgcccttggctccacatctcttactagttatggaccttctctttgttctgtgacatatcagaacttctgcaagagttgccctcacttgctttttcacctcccattcacttttccagcctctcaaatttagcttctatcctcactcttccagtgaaactgctgtcgtcaaggccattagttattttcatgttgcaaattctagaatacgtttctcctcacattctccctctcagtacttttcctcccacctttctcctttgatggcccttctttggtgggcctcagggcttaattctaggctaccatgtttcctcttttgggattctccgatccattacattactttaaatatcttgtacatggttaatgaattccatattgatatttccagtctgacttctcccctgatttcatttgtgtatcagactgcctgtttgacatctttactggaaggaaaatcatacctaagatcttcaaaaaagaactttcgattcctttagcccccgtgacatacactcttctcccaaacttgcccatcttaggaagtggtatcactctccgtctagttgttttcctcattctctacatcaaatccatcagaatgtcctgttagttttaccttcagaatatatttcaaagtctttgcctcatccccactgttgctattctagtccaagccagcatattacttacttgattcttctatagtataatggatattatatcttgactctttataatcattttgtggttcccaagtactgtgaagatcaagtctcattcattctctagagaagtgaaaattggcctcagtctcctaggatgttgttgattccttccagaattaaattaaattggaggaagataagggtttgggttttttaatatatgtgtcaactgagaaccattatgtagaattcaaataaacttaccttacattctttgcaatggattgtcaaaactttagatctaattgacatcttcatttttgtcaaaatgattagaggtgaatgtgatctccaataattatttttaaatacctcaaacaatagcattggacaagctcttctgtaataaactcacaggtgttgatttgtcttactcttgagcatttgagttggcccctcatctacttttgatcaaggttctctttttgggtcaggtactcttccagggaacctaattagacataaagttaattggttcacttttaatcagatatttacagcgttcataccagaagtagtaatcatgagagtcaagccttcatagcagctattccagatgaagtcatgggggtcaagaggacaatagctggaaaagtctttgagagttcatcagagtatcacatcagttcctcacgtctgtctgtgatttgccaaacttaaagccttcactacaaaacagaaaaaataatagtatagaagcatacttgcatctattctgctgttgattatgcatagcagtagcagtggttttaaaataagattgggtgcctcccccaaatctgttttcctgcaagtcattcttaaggcttttactcaatatagtaagcactcaaagaacaaataagctgaagtagaataatgtggttttccagacataaagcttgctttttaagtttgcctatcagcatagccgaaagcttagaaggttgcttcatctattattttagatcagtaatgggtaaaggtagagatccttaccaaccttcagctcttttccataccccacccttctttttttaactgcctctggaagtctataaacacatgtataaacaaaaaagtgagatattttctaccacatagtctttctatctggtgtccaagctgtattctgttaattagtttgaaagactatacagtgagatgtgcagttttcccattccattttcgaaatgttctaactttttaacctggtgatattatctttctttcagttatgacatgcaccgattacatccctcgctcatccaatgattatacctcacaaatgtattctgcaaagtaagttgaataattatttccaaaatgcatatgctttttctgtagattcattgcaaaatttaatattatttttcctctaaaataatagatatttaaattatttttacctctcttattctatcgtcattccaatttttaattccctctaaatatagtctatgtagtatccttttaaaaagtagatggtgtctgcaatggatcattttacacaaaagcttactctaaaatgagtaggcactgaacatgcaaaatagtgttagtgatcaaccatatcattgattgacctctgatcattttctctgtcctgtaccttgacatatagcatacagattaataaaaacaagactgaatttctcagtccaatctgtgttcggtttttttttttttttttttttttttaagatagaatctcactctgtttgttgcccaggctggagtgcagtggcacgatcttggctcactgcaacctccacctcccgggttcaagtgattctcctgcctcagcctcccggatagctgggactacaggcatgccaccacgcccagctaatttttgtattttttagtagagatgggatttcaccatgttgaccaggctgttttcaaacggctgacctcaggtgatctgcctacctcgcaaagtgctgggattacagtcgtgagccatcacgcccagcctgtgttcagtttcttgattgaggaatgtcctcagagtagaaccgggcttgaagttagacaggtttggtgggttagtcactaagaggttatgttttgggccttcatggggtaagatcagcattaatatcagccaggtttttcatctccaaagtgggtaggtgcagaacagtgtgtataccaagctacctattgtgcgtaataaagagtggacctatgcatacaaagacacatacaagtgcatttattaagccaggatatgtgcttatgtgcttacagctgctggatacataaagaaattggtaacaaaagcaagagatactttatggggctgttataaaaaggaaactgtctttcttttccctggttatatctgtttttaccttttgaattttcattaattaaaaaataaactaattaaaaagtcaacccaatgagttcttctaatttttaatctggtattaacactaatggtgtccttgggctaatcattttcatgtgactttcttctgtgaaataactgaacctattctctgagattattatgaagaaattagatactaaatgtgaaaacacatttgagctttgggctacaaagactctgcatgaaaaaggacattatggtctttaccatatctggagattaatccatttaaggtcactaagatttaaatcattcccatgtgacttgagtaacaactctaacctgagctatttcctggactcagatctggctaagaagaatagttatttttaaattcagttttttagaatgtactgagatgttaatatgttgcagattccaaattcatttattcattcagaaagtatttgcatacctgctacattcagaattccttattagctatcttaattattctatcttaattcagacctctttattacttatctgaactgttttttaactggatctccatttccagtttctcctccctttctaaaccattttacaaagcagtgtcaaaataatctttattaaagaacagctctgatcttgtcactctttgctcaataatttcagtggctctcagtttcagatttgccttttagcctggcattcaaggtctttgcttcctttctctcgctacttctcttaatatacttccctcagttatctgtgctctttgcaggccgaagcccttgctttccttactctataccctccaggacttttttcttgtcctagaacaccctttctctcccagttctgtgcctcttatctgctcagctagtatatcacttctttatggcctttcttcattttcctcttcccccaaaggtgaaaaaaaaaatttcccctttaaaacaccccctgctatattttattatgcttacatggtacaaatagcattttcttttttacttatatatacagtgtaactcaccaaatgagataattggtatctaaaaattcagtgcaatatcatggatgaaacaattatatctgctagctagtgtaaagtcccaggagtttcactgctgaaatctctagctatccctgatatggtggcaccaactagtggcagtatgccctgacttaaatatcattgaggagattgagtcctgtctggaacttcccagattttgttacttacctgggttctgttttgtagacttgatttgaggatattggaacccatctctacttccgttttttgatgtgtttgcttgccttttctccaccagcctcacccgcttttccagtctcactttccctctcagaactttagtttggttcaaggggcagggtggagaatgagagccaattgccaatcttgttctcttagttttctattatattaggattttattctagatgtaggcataagagcatgaataagtttaatccatccttgtgtctcacatagggccatgcatgtagcacactagaaatgtttgtaggataattggaacttggagggatgtttggaactattaaatttttcataaaattgttccttgggttgatgataggagaacgtagaaaggaggaaagacttctactttctgatcataagagccattttaggccgggcgcagtggctcacgcctgtaatcccagcagtttgggaggccaaggtgggtggatcacttgaggtcgggagttcgaggccagcctggccaacatggtgaaacaccgtctctactaaaaatacaaaaattagccaggcatggtggtgggtgcctgtaatcccaggtatttgggaggctgaggcagaagaattgcttgaaccggggaggcagaggctgcaatgagttgagatcatgccactgcactccagcctgggcgacagagcaagactctgtctcaaaaataaaaaatttttgaaaagagccattttatgtggaagattagtctccttgttgcagattctttgctgttagtggtggtagctattttacctatttttcgttactaaagtaaatcacacaaaagtttttgttttcatgaaattttccagaccttatgcacatattctctcagttcctgtttcggaaactgcttaccctggacagactcaataccagacactacagcagactcaaccctatgctgtctaccctcaggcaacccaaacgtatggactacctccttttggtaaggcactgtattgtaaacaatttctaagaatgttgattttattccgcagaaactttgatcagccatgcatcattctttacaaagcacttagttacatatgtggttgggtatgcaactttgcaacagtatgtttgatgcatgtaataaaaaaatcatagtttttcagtactcatttagctattttgtatgtactaagtcttgaccctgaagcttggaatctttaagtgtttggtaaattctttgaggatttgctattgatttgacttactttatatacaatgtagtatggtactatcattaggaaagcataataaatatatttcgaggtggccaatttcttgctaacaccaggtagtctgaatatgtatcatagtttgctctgtggggttttttttgccaacttctccctctcctttctcccctaaccccacccaaaactgatcagatattgttctgctgaaccaaaaagtcattttagaataccggaaatccccaattttcttataaccttatgtgcctagggagttattttcattggttttaggtgtcttggacatgaactataaattaaaatgatttatcagaagtcactttaaggttctttgggcacttaatatctgtgcttatttttctatgtgtgtaaatgcagtgtgcttcattgctccttccctgctttcctgaaatgggtgccagaaaattaaaagaatactatattatttaaaaatatgtaatatgtaacaaaattatatttctataggctttatttaatcaagctacgaattagaaaaattttccagacagatgaccacacagattctggatgtattaatgtacctgcatctagtttctgcattcctgtttctcctgacctgtttggctactcttttatgatattggcagctttcttacttttaggcttgttagaattctttggctcctggtaactgctagaaataagaattgggaattatgtttaataatagtggggttgataacttcatatgaaatgggaaacaaattttcttgtttccccatttgtatatccatgtttccatgcctgttagtaccagccagggtactcagatcttatatttatgatatgattaaccagccaacactgaatggaccttttgaaagacccctctgtgaatatgtttgtgtttatttctttttggttatttaaagctgatttttcaacagttgactaataataggctagcaattataatttttaaattacagttttttaaatcttctgttttgatttgaattattattattagccctttacaacagttgatcattcctgctgttcaatattaaatacaactcctattacatctctgagcatgatttatggaatacctcagataattctgtgtgcatatggatcctagatataattaattttttaaatgatcactatatttcccttaaactattattattattattttgagacagagtctcgctgtgtgcaccaccaagcctgcctaatttttgtattttagtagagacagggtttcaccattttggccagctggtctcaaactcctggcctcaagtgatctgcccagcttggcctgccaaaatgctgggattacaggcatgagccaccacgcccggccccgtttgggcagatctcttgaggccgggagttcgagaccagcctagccaacatggtgaaaccctgtttctattaaaaatacaaaaaaaaaattagccgggcatggtggtgggcacctgtaatcccagctactcaggaggctgaggcatgagaatcactcgaacctgggagacagaagttgcagtgagccgagatggtgccactgcactccagcctgggcgacagagcaagactgtctcaaaaataataataataataataataataataatacattaaaaaagaaaaaaattctgtaaagtaaatagatctctattaaaaccttgaaggatacatgtttatattgtatgctggtaatattgttaataataggctcctttaataatctggttttgtttaatatttgagggcaaggaagacttgtgtttcccaatttcttctatcagtaattcagaaagagataatcattagcttaaatttgactttaagtaatgtatgagacttactggagagagattttggttggggtaatgtgaatgatagagatggcatattctcagaatttaccagagaaattataagagaggtttgtaaaacttttaaaagtgactgtattttgaaaagatgttttcttgtgttttatcatgtggctttttttggtaatgtgttaaattaagtaggagaaaacacttgatttctttctttcgaaatcaagattttgatacattgtgtcatcttagtgctgcctgttttcagattagctaattcgttttatttcagatgcaaatagggcttcagaaaaattcattataataatattaccttgtctctattatttactataataagctgtatactaagaataagtatttcacgctgtatagtattgtctcatgtaatcctcagaacagccctaagaggtaagctagctttatccctttttataggggagaagcagagttaaatcatgtgcccaaagttcatacaattagtaaaagcctgggattataattgaacccaggattgtttcattctagaagtgctcataactttaggtctatatcaaaaagatggtctcagagttgagtttgaaattaaaaagcttcctcctcttgaagaaaggagaaaagactagaagaaatctaagaaggctatatgatgagtaatcttttaaagtaaagaaatactgatcatattcttcccagagctgtatacaaatggggtgggatggcagaaaggggattagaagtttaacttctaggaatctgaaggagtatgtgtaaggaaaagggtacttgtttaatgttagtgggagttataaaatatgcctttaggtgccactgttctgatttcttttaaaagaactttaatgtgagttggaggagtgggtgatatgcattaagagccttaaggatgttcatttcatttccctcagtaatttcacttctgggaatgtatcctatggaactaattagagatacccacaaaaatgtgctgaccaacatactcattgaagcattatttataatatgaaaaaactgaaaacctaaaacttgaatattaaggtatgtgttaaattgtatatggctgctgcatagccattataaatcatcttcttaaaaaatatttagggtcttgagaaaacagtgtattattaattgaaaaaagcaatatgtaatagcaaaaacacaatgttgtaataccaatttagtatttttaaaaatatgtgtatagccaggtgcggtagtgcatgcctgtagttccagctacttgggagactgaggtaggaggatcgcttgagcccaggagtcctgggctgtagtgcgctatgctgattgggtatcttcactaagttcagcatcaatgtggtgacctcctgggggtgggggaccgccaggttgcctaaggaagggtgaactggcccaggttagaaacagcaggttaaaaccccattgctgatcagtagtgggatcatgcctgtgaatagccactgcactccggcgtggacaatgtagtgagaccttgcctctaaaaagaaaaaaaaaatgtgcgtaaagaataattggaagcaaaaaaagtggctgtttttcctacagacgttttaaaaaatatatacatatactttgtttataatcaggaaaagtacttacattaaattacttactatttataatagcctatccaaatgagctgctgaatcaacaagccaaaatatcctttcatgtgctttttctagcattggtgtgtacttcagttcctcaccagactaatctctaaagagcactatacgagttactataaattgaactgatgagattagtttggatagtgactaatcaatagtgaagtacttgtgctgagaaacttgggtagagtttgtgataagaccccattctgggggcatcaggaaggcactcagagacagacttacttacccattgttagcttgacagtttctctgcagcaggctcttgatgcttaaaagtacttgagaaacttggtagttgttggcatagagcagtggactgggagtcctgtaattagggtttggtttccttgtttactatgagcaatagtgctgtggagtcaaaccattggatcatgctgcctattatctggaattctgggagggttgcttttagaggaagatgatttgcatgtctgaagagccaggtctacagtgatgctggaggtactgtctgtattgttttttattcctcataaaataattatatattagacatctactttatgtttctggccaaagatattcaaaactagctagctatctcctacttattttggacatttgtgttctaatttttgatcttataagagggagactatcaaaacattctcagttgatactattgttattaataaggtattattttcatatagtgtaaaaataaacatgtttataaatctaccaccttagggtcaaaacctatttggaaaaagaaatcacagtgatgacaataaatctgaaagttattgtgacattgaaatagcaatttgtttaccaaaaagtgtgatatacaatcagcaggaatcatagcactgatactcacattttacatcataaatgttttaaaaatgacattctcaaatatttttattgttgaaaatcagacatggcaagaatcttaattatggctaatctggacaagacatttaaatgatcatgaattatgatggggcaaacgcttctaattcatgctagcgatgtcagtattcctcagtctcttaaaataagttatttcatgtgattaatagatgagaaaagaatattacattttctttttatgcattaagagtttggggcaaagccaggcacggtgacccatacctataatcccagcactttgggaggtcaaggcaggaggatcatttaaggctaggagtttgaaaccagcctaggcaatatgacaaaaccttgtctctgcaaaaatacaaaaagtagccaggcgtagtgtgcctgtggtcccagctattcgggggtttgaggcaggaggatcccttgatcccaggaggttgaggctgcagtgagctatgattgcaccactgccctccagcctgggcaacagagcaagaccttgtctcaaaaaaattaagaagtgattatcatatcccactgttggtctttttaagactttcatatttctctttactattcctaaatgtacttatcaacaaattggacaaatctgagttgcactgaagtatctcagtgccctggtgaagcagaggttctcattctcaaagtattgtatttttaattgcatatatgtgttcattggctataaattcaatcactcctagtttatcagagtaggagcaaataaatgagatgagttaatgttgagtttgaagtcatggctaaccttagtattgatatcatacatggaatgtgtttggttgatgaaccttcttagacctaattatcagcttcaactacactaacccagtaaccatagctattcagaacacagtgaacaaccaggcattaagatttttggggcctggcatggtggcttgtgcctgtaatcccaacactttgggaggctgaggtgggtggaactcctgaggtcaggagttcgagaccagcctgaccaacatagtgaaaccccatctttactaaaaatacaaaattagccaggcatggtggtacatacctgtaatcccagctactagggaggctgaggcaggagagtcgcttgaacccgggaggaggagattgcaatgagctgagatcatcgtgccactgcactctagcctgggcaacaagagcgaaactccatctcaaaaaaaaaaaaaaaaggattttctttttaaaagtaggcttttgtgtagccaaaattatcaccaaaaccatgcacttaagagtgtttcactcataaagaatatccttggactctcatgcagatgcaaagctttgtttatggttgcctagtttattgcaaattaaaaggcagatactgctaaggaagtcaagaagtgacagaccacagaggaaaaacagtgaaattagaacctaaaaatcagaactataattaagttatatttagtactaaacaattgtctttacacatcacagtagcctctgcggtatctctgtaatatatgtagcacagcacagtttttatttttgaaacagtaactgagaaaatctaaaggtatgtgtgctatttcctccttgctcagaaggcaggaagggatataaatatattttagaaagattgttactcaggagcattatgataaaaagaaaataaaaatgaacagctatgatgtttgtcagtatgagatagatttatatgttctgacttggaaagatgaatcttagaggtattatgtggaaaagcaaattatgtacactatgtataacacagtccttggctggcagtggctcatgcctgtaatcccaacactttaaaaagccaaggtggaggattgcttgaggccaggagttcaagactggcctgggcgacatagcaagaccccacctctacaaaaaattagtcaagtatggtggcacacacccatagtctcagctactcctgtagctgaggcatgaggattatttgagcctaggtgacagaggaagaccctgtctcttaacaacaacaacaacaacaaaaaatcacaatcccatttttgttaaaaagaagattagtgaatacatagaagaaatctggactgagtgtagtggctcatgcctataatcccagcactaaaggaggctggggcaaaagtatcgcttgaggcctggagttcaagaccagcctgggcaacaaagcaaaaccctatcttatttaaaaaaaaaaaaaagaagaagaagaaatcatctgggtgactcttctgcaaactgttaatagtggttaagtctggatgatgggattatatatgactgtattttttttctaaattatgtatttctgtaatgtttttaatttataaaaataagcaggtatgtctttcctaatcggaagaaacaaaagtaacaaaataaccagcttaagaaggcagagaagtatttaatatattttagaaaaatttggtccttgtttaatgggtaagtgaattttaaacttatatggaatgtctcctaccttgacagtttggataaattatttatcactgtacatgaacatcaggcactctttataacagatactccagttgggtgtcaataactctttttttctgaatcctggtcaatttcccccagtcattgaaatgaatttatatacatattgggatttgtggcaagctttttgtttctttagcctcatcccctaattctttgaaagtgttatttgcttgtgatatattacaagtgggagattcaataattttctcttacaagcaaatttatttttgttttaagatttagattttaaacctactggctgatatttgaaagcataaccatgctcctcagtcccagtgtattgtttgtaattggtccaatttatctgattcaggtgcattgtggccaggtatgaaacctgaaagtggtttaattcagactccatctccaagtcaacacagtgttcttacctgcactacagggttaaccacaagccagccaagcccagcacattattcttatcccattcaaggtaaataggcatggttgtgtgtgtgttttaaaattattattattgtttcttgtttttaatctacctgtatctccaaacaaacaaattggataatacaggagctctgtcttctaaagtagaaagggggtgatacttggatttgtgcatgctttttgtgttaggcaaaccacagcttaggagtgtggtttataagtagtttagcctttgaatgtgagctgcttaatagaattgaagccttcccttttgcatgttggtgtccagaaaacgccttgattttgttctagtctattttcagtggcattttgtcctataaatgagcagaagactccatgggttggaattttgctgacctgtatgaattgtcatagcagtatgtgaggtgtgtgctgcttttctgctgtgtcttttgtcacacttataccccatttactacttgatgagagcatttctcttgctcaagaagttcattcttatttctctttcaggataaaaagcatagtattaaagcttaagctctaaacatctttaccttccaagttcttcctctaacagagttagaattatgacaggactattaggaaagaaaacaaaaaactcaaaaggcactatggagttaattgcctattcttccaaatccagggcaggcaatttgtcattgcttcagactgggactagtatccttgtacctggcttctcatctgcctcttttctcctgatatttcccagcttttaaattttatttcttataaaatagatagtagagggattagtatgggacctcaaaaacctatctgaagtactcttaatgtataaactttggtgatgaaaaaaagttttaatataggttaattagattttgattttcagttttaactgttttcagaaatgtttgaaaactacttctccttggtctagtggaaacagaactggtctctatgttctgagaccttactctgagctacctttacctcctgttgtttaccaagtctcctcttttcttcacttgtttcctcttcttttttttttttctccccttgtcctctcccccttctttctttctaagatgggaacaaaccaggagggagaaacttgaaagaatggctttgcctgtcttctccaccactccctttcatttttatagagtatttctctatggttttttgttttgttttgtgacagagtctcactctgttgcccagctggaatgcagtggcgcgatcatggctcactgcagccttcaccttccgggctaaagtgatcctctcacctcagcctctccagtagctgggactgcaggtgcacaccaccacacccagctaatgtattctatatttttttagaggtgggatctcactatattgcccaggctggtcttgaactcctgggctccagcaatcctcccaccccagcttcccaaagtgttgaaattatagatgtgagccaccacacctggcctagtatttctctatgttgataggccttttgggttcaaccacaggtaagtctagttgccaagtctcttctaaacaggtatatctgataacttacacctaggttgtgaaagaagaccaagggttctcttaatgctctaccaaaatgtaaaaccaccattcctctgtagttatgtctagaatttgaggaatgtgatagctgtgcttatttctcccttgtaaaacaagaggaatcacctctttggggtctgttaggacccattgctttaagagtcatgaggctgggcgtggtggctcacgcctgtaatcctagcactttgggaggccgaggcaggcggatcacctgaggttgggagttggagaccagcctgaccaacatggagaaaccccgtctctactaaaaatacaaaagtagccgggtgtggtggcgcatgcctgtatcccagctactcgggaggccgaggtatgagaatcgcttgaacctgtgaggcggaggttgcagtgagccgagactgtgccattgtactccagcctgagcaacaagagtgagactctgtctcaaaaaaataaatagaaatttaaaaaaatggaagagtcatgaaaatatcccttaaacttcactaaccaccattcttatttgttatctgttagaacattttttcctttggattggctaacccggtttccttcattttgctattaatgacaattgcaggtatttatgaagtgcttactgtgctcttgacatttttctaagcagtggatagatgttgcacacgtaatcctcacaacaacccaaacctcattttagagagggagagcctgaggcacagaaaagctaagtagcttatccatagtcacagtattagcaaataattaaggcaggacattagctgggcattctgactccagagcatgagtacaatatttatgcttttcagtattgaggtcatagtatcaatatcaactctcccataattgagaacctttgctaacaaatatctaaattcacttctcctccctttttgtggttaatctattggcccattttattgttcattagcacagggtagaaattaaggcagaagttaaccattaagttatcaatttttgccatttattctgatgaaaaaattgttaggaaaacaatgggctaaaatgaaacgtgggtattattggtattaaattacttaagttcaccactatcaatattactctcctcgctcctacttttccctttccttttagcatggatagtgaatgttagctatccagggctgtttctttccccctgcataactacccaatttttttaagtgttcaaaacaccccaagcattctgcagttgacagcagcccatcctccctgggggagttagggaaattatctcaaaaacctaatctgcttctggcttgattaactctaagcagaaccttttctttagtttgtacttcagtggtaccataatgagaagagactgcctttgtttgctcataaaaatgttttgaatgagtagatctgacttctgtagtatcatccttttcctagagtatcttgtgactatgtggccctatctttggtcattttcttcagctgagatgttttaattggttaaataatattcaagtggcaaaattaatttcagaaatttcaaaattaattttaattatatatatattttgagactgagtcttgctctgtcgcccaggctggagtgcagtggcatgctctcggctcactacaacctttgcctcctgggttcaagggattcttgtgcctcagcctcccgtgtagctgggattagaggcacccaccaccacgcccagctaatttttgtatttttagtagagacagggtttcatcatgttggccagtctggtctcgaattcctgacctcaagtgatccacctgcttcggcctcccaaagtgctgggattacaggcatgagccactgcgcccagcctaattcaatcttttaatgagtgtctttgtactctagtatcattggtaacacacaataatctatctctgaccaggagatttttaaaaaaatttttattaatagatgtttttgtttgtttgcttgtttgttgttttttgagacggagtcttgctctgtcacccaggctggagtgcagtggcgtgatctcagcttaatacaacctccacctcccgagtttaagcgcatcttctgcctcagcctcctgagtagctgggattacaggcacatgccaccatgcctgactaatttttgtatgtttagtagagatggggtttcaccatgttggccaggctggtctcaaactcctcacctcaagtgatccgcctgcctcggcttcccaaactgttgagatgacaggtgtgagccaccgcgcctggcctagactttattttttattaataattttagatttacagaaaagttgagcagacagtacagagagttcccatatatccctcctcctgcacagtttcccattattaacatcttacgttagtatattacacttgttacaattagtgaaccagtattagtatgttattattaactaagtccgttgtttattcagatttcctgtgtttttatatgatgtccttgttctgttccgggattccatccaggataccaaattacatttagttatgtctccttaggctcttctagactttgtagtttctcaggcttttccttgcttttaatgaccttgacagttttgaggagtactggtccaggtatattttaagatgccccactcttagagaatttatctgatgtttttctcattattacgctggggttatggattttaaggaggaaggtcacaaaggcaaggtgccatactatcatcattatttatgactgttgatgttgaccttgattacctaattgaagtagtgtttgtcagttttctccataaagttactctttcctccctttctgtactgtattctttagatagaattcactatgtacagcccacagttaaggaatcatgctgccccttctttagggtagaatatctacataatgtatttggaattcttctgcccagatttgtctcttctccccagtttgttgatttattcagtcatttttttgtggactcctagatatttaatttatactttgggttataatccaatactactttatttattttgttccagtttggccactgggagctctttcagttggctcctatgccttttgacatactcccatttttttagtttttggttttcccccccccccccacccagcactttcttacttcctggcactacaagatgctccaggctcatcttgtatattacttattcaagtcctattatcaaccattttttttaaggaatcctggttccttttattggaaaaaatggtattcaaaaccaagatttgggcttccagcctgggcaacaaggcaaaaccccatctctacaaaaaatataaaaattagccaagtgcagtggtgcgtgcctgtagtcccagctacttggggaggctgaggtgggaggatcgcctgagccttaggaggtcgaggcctcagtgagctgtgatcgcaccactgaactccagcctgggtaacagagtgagaccctgtctcaaaaaaaagatctgagcttgaggggtgctaattgctactgaggtgtcaggtgacatttattttaggctttctcagctgacagagcaaacaaatatatgtaggtatactaacctatgtaaatacacatatctataaatatttctgtatgtcgtaatctgtatctgtgttgagttaaacatgaattcttactgatttcttgagctctgatccattattacatagatcattctaaaccctgtcccttattgatctgaaaatctccactccagcaatgagaatcttttaggccgggcgcggtggctcatacctgtaatcccagcactttgggaggtggatgcaggcagatcacgaggtcaggagatcgagaccatcctggctaacatggtgaaatcctgtctctactaaaaatacaaaaaattatctgggtgtggtggtgggtgcttgtagtcccagctacttgggaggctgaggcaggagaatggtgtgaacccaggaggcggagcttgcagtgagtcgagatcgcgccactgcactccagcctgggcgacagagcgagactctgtctcaaaaaataataatcttttattaggagatttttattattttgatttactaagctccttgtgtggagcagtgcttgcacatagtaggcactcaataaatatttgataaaggattaagtgaacgaatgacccacttaggcaatcagttttaaccaaaatatgtacagcttctactggatcaggaattgtcagttatattagtcacataatgagagtaagttttaggaacccacctgtcagcctttagcagaaaataatgattttaggctgggcgcggtggctcatgcctgtaatcccagcactttgagaggctgaggtgggcagatcacttgaggtcaggagtttgagaccagcctgaccaacatggtgaaaccccgtttctactaaaaatacaaaaattagttgggagtagtgtcaggcacctgtaatcccagctactcggggaggctgaggcacgagaatcgcctgaaccagggaggcagaggttgcagtgagccaagatcataccactgcactccagccggggtgacagagtgagagtgcatctaaaaaaaaaaaaagaagaatgattttgcccttcacacttagtgcacacaagatagatgtatatgaatcccacaaatatttattgaccatcacctgctgtatgtcaggtgctttgctagatgctggagattataagacagcaggattctgcctttttggagcttacagactagtggggtgcgggggagaaaacaagtgagtaaatacataacagattttgaacagtgctctgaaaaaaaaattgatcactgtgattaagaaaacagaaaaggtcttggttttaataggtcaaaaagaccctctttgaggaagtgagtcatgctgaggagccatcatgctgggaaggcaagggggttggagagaacagtctaggcagagagaacaatattgcaaaagtcctcaaatgataaagagcttgtccggttttgagtaacttaaagaaagacagtgtgagcaaaggaggtgaagtgacatgatctaaaattagagaggtgggtaaaaactaaatcttgcacaaacttttatgtgccattaatgcttgaattaaacttttaactttgtagcactatcacttggtgcagctgtgccacttaccattctgtaaccgtggtcttctgttcaaagctttatctgtatattgtctgttttaagcggacatctagtggggcctggttctcaaaagtggtgtctttcaagtttttgcagctccattgtcaaaacaggagtgaaggctgtccaaaaacagttgaccatgccattagcatttggagagctagcagcctttagatacataataataggagccagcacttgagttttatttgattctctaaatttgtagtttttgttgcatagttcattgttgctgcttttgtttttaaacctgcaattgaatattatttttattcacacacacacacacacacacacacacacacacacacacacacacacacgatgatctgtatttttttaaaagtgcctggctttttagtcatagctgtatgtggggtagggcaggcagtggttgtatacatttttaggcgagtttgccttgggttctatggtggttataagagcctaaaaaaattacttaattattgactaacttccctcactagaatttaaactccttgagggccaggactttgtcttactattttatccttcagtggctgaaatggtttctaggcacatagttgaccctgatatacttaatgggtttgctgaatgaatgagtggcacatgttagaaataatttggcttagttggagaaaaaagtgttattaagccctatgaactttctgggtcagcagaccaagttcccctataataaaagccaactattgctcagagaaatttgtgattttaatacagtacttgttaaaaactcagagttatcaactagctaatcaagccattaaactttctagccgggatataataagagtttatggctagttgtttttaaggtctaccattttacctccagtacaattcattaagtggtttgaaaattgttagatttgtaaaaccaccttgtcaatcagagtacattttcccccatagagatcagatatgactgagttgtacctcccaccattattaagttatggagaagtagccgggcgtggtggctcatgcctgtaatcccagcactttgggaggctgaggtgggtggatcacctgaggtcaggtgttcaagaccaccctgaccaacatggtgaaacccatctctactaaaaaaaatgcagcattagccgggcttggtggtgcatgtctgtaatctcagctacctgggaaactgaggcaggaggattcttgaacccgggaggcggaggttgcagtgagccgagactaccattgcactctagcctgggcaacaagagtgatactcatctcaaaaaaaagaaaaaaaggatatggagaaggtaggacagaattaaagatcaataggtgaaaaagaggattgtatgccaggaccagggccagaagaaaactgaactaaaaatggacttgctggggaagataaatgattaaatcaattctttattttatttcccaccttaaatcacctgtgttcagttttattgcaggcctgcctaggataatgtactgataacaaaatctggaaaccattcaaaattcttttcctacaagaatggttaaaaccatttacagagtcagttaccctgtatattgtcatgttttgatgcttcctcttaggaaaaaggatggcttaagccacagtaggaaagaaggtgaatattggttgaaagaaaataccttctgtaaagctataaaacctatttcatttagttgttatgtttaggaaagtaagcccttaagagtcctttagttcccctgaagcaaaacgtgctatagaaaataaagttactctggatagttaggaaatttgtttttgtttttgttgttttaattttttttaatttattttttgagactgagtcactctgtcgcccaggctggagtgcagtggcgcgatctcagctcactgcaacctctgcctcccgagtttaagtgattctcctgcctcagcctcctgcatagctgggattacaggtgcacaccatcacacctggttaatttttgtatttttagtggagatggggtttcatcatgttggctaggctggtctcaaactcttgacctcaggtgatccacccacttcaggctcccaaagtgctggggttacaggcgtgagccaccacgcacctggccatagttagggaatttgaaccctagcttagctgctgaccctgaggaagaagcactggatgaagaattgggagatccaagttgtcattttggttatcttccattatttttgctgctgtggacaagttactttaattcttctttgtcctaggttcttcatcttaaagctggggttgcagcaatagctgtaactgaacttactgtcttctggattgtcttctaagccgagtacccttagggaaagggatgaaaattatctaattttgaccagagcacttaagtttctattgcatttgttctcctgccctgttctcaatggaagttttcttactaattttctctctgggggactttgttaatggggcaggtagtcagttagtcaggtctacctgatggtgaacccatatggtgtgtgtacctgcagtaggaaccatgtctaagtgtgtttatgataaatgaggacaaggagtttgagaacagtactgataatatcagttacattgttcacctgagaaaagtcactggttagtgctagtcattgagattttgattaaaaccctagtagaatgaacctatgacagaagaagtataaaacttaacccaaattacttgtctttatttttattgttttatgtgaatggaaatcagcattttctttcttttttttcttttttcttttctttttttttgagacagagtcttgctctgtcacccaggctgtagtgcagtcatgcgattttggctcattgcaacctccacttcctgagttcaagcgattctcatgtctcagcctcctgagtaactgggattacaggcccgtgcccaccatacccagttcatttttatatttttagtagagatggggtttcaccacgttggcaaggctggtctcaaactcctggcctcaaatgatctgcctgcctcggcctccgaaagtgctgggatacaggcatgagccaccacacctggcctcaaattacttaagacagcccaagtatcatataaggtacatttttatctgaccagagtaatatttaatattttctgagtttttccaggctcattgttaaagtctctaaatgctatgtcattgtgtttattgatccacattagtaatctattatttgagtagaactcaagaagcaattctaaatgctttggaatttggaggaccagctctatttctcatgtaattatgttgtattaggaaaggcgtaacttggggcaagtgacagcaaacaatatcacagtgtaagatttaccagagttctactgctttacagtaggtcacattgcaggtgagtcatttttcagcctctggagaagatgggctggaggaattggatttagctgtgatttcattgatattattagtatgagctgtgaattgaatatatatccttttaggcctttaataagaagaattgaagactcaagttgaaacagaaagatgtttcaaatgttttgtttttaaccaagtgtaaatgtagctatcccacacaaaaaagcaaaacgagtgtttgtttcctttgccaatgttgtttatctccttataaatctgttcacttaaaacacatctattttcagtttcttctaaccttttacataatatctttaatatcttttaaccccatcaatcctctagcttcaagcacaaatgccagcctgatatctacttcttctacaattgccaatattccagcagcagcagtagccagcatctcaaaccaggtatgatgctacctttgttcatcctgtttgatagagttcatccagcttgctctttcttctttccatggtcaatttgcctatctaagaaacaaccaggaatagtatgggctgtggagacttttttctggataccttcagaactcggaccctggatggcatcttaggttactgtctagtttttgttgttcctctgctgggtctctctagaatatggttatgtctgtttctttactgtatttgtcttcacttcctactctgcccctactagaatgtaagctgcatgaaggtagggatttatttttctgttttgttcatttacatattcccagagtatagaaaaatgcctgccacttacatcaaaggcacttgataaatatttatggaatgaacaactcattctttatgaattttttgtggtctattcttgatcactgttatgttaactatgcttaggagatcactggtaacaccttcagtgttctagagttttttatttttgttttgatttgttttctctacagcaattatcatcaccactgtctccttggatcttttcctggctacagttaacattactattctggttattatactggttttgctttttttttttttttttttaagatggagtctcactcactctgtcgcccaggctggagtacagtggtgcgatcttggctcactgcaacctctgcctctcaggttcaagtgattatcctgcctcagcctcctgagtagctggaactatagtcatgtgccaccatgcccagctaatttttgtgtttttagtagagatgaggtttcacatgttggccaggctggtctcaaactcctgacttagagtgaaccgcacccgccttggcctcccaaagtgctgggattacaggtgtgagccaccgcgcccagccttgtttattcttttagtccacaaatatttattgagttcccacctgtgtacctggtatttttctaaggactgtctctttctctctcatagctcttctttttgaccctgtctttgaacgtggacagtctctatttggtttttccacatgttaattacttcatccacagggatgtttaaccacataatgtccatttactgtcaccaaagattctaatcctccctcatgataattacagcttccaactgattgacatttttttctttaatgtcttgctgtttccctaagttcaacatatgtaaaatcagacttttattccagccctttttatgtctctttgtcttccagaagtaaaaccacttttccctgacttcttaattcttattagtgatactacatttttcttaataaacctaggcctaaaaccagaccagatatcttccattatttttctcacaaccttacccaatctggtcatttctcaaaatctttgagaagaatttcttttgctttttgctatcgtctccaatgttttggtattttcccttttaatcctgaattaccatagttaattgctcattttatttccagttttttcccccttgtgcctgttcattctctaaaatactatctcattaattttttctaaatcccactttttgtcatgttactgacctgctcagaatattttcatgttttttgtttgtttgtttgttttttgagacagagtctcgctctgtcacccaggccagagtgcagtggcgcaatctctgctcactgcaagctccgcctcccgggttcacgccattctccttcttttcatgtttttattcgttggtttgaatttgagagtccccattccctattccctagcccacaggctatatactattgcctaaagaatccaagtcttattgctttaccaatcattcaggcctacagaggtcctttgtttcaaccagactcagcatctgtggtccctgaataaaatctcctcagagcctattcatgttcttactttctctgcctattaatctcagaaagcttcttcaccatcatactttacaatgatagttgtctgttctgtatttcagtcatttgacatatattttattgccattttgttgtctgtcttctctcctgctagatttttaactcccttgagttctgctagtgtgacttattcttttctttaatatttccttcttctgcccatgcacaaatacacacatacatataattatatttggtttatggtagagatacccaatgactaattagaaataatgtatctgatcagttagctttttcctacttgccatcattatcagtgtcaatggaatttttttagctgcgtatttgaactgtcatacctagtttttttacagctttattagggagtaattgacatacagtaaactacacagatttaaattgtacagtttagtaagttttgccatatatgtgcctatgaaaccaaaagttttatcccaatattttaagaaacctttttttttttttgagacagagtcttgctctgttgcccagtctggaatgcagtggtatgatctcagctcactgcaacctctgtctcccagattcaagcgattctcctgcctcatcttccctagtagctgggactacaggtgcatgccaccatacctggctaatttttgtatttttagtaggggctgggtttcgccatgttggtcaggctggtctcaaactcctgacctcatgtgatctgcctgcctcagcctcccaaagtgctggaattataggcgtgagctcccgtgcctggccttttttttttttttttttttttttttttgagacagtgtgtcacctaggctagagtgcagtggtgcagtcttggttcattgcaacctttgccccctgggctcaagttatcctcccatctcagcttcccgaatagctgagaccacaggcgtgcatcaccatgcctggatttttgtttgtttgtttgtatttttagtagagagaaggtctcactattttggctaggctggtctcaaactcctgagctcatgcgatcctcccacctcgtcctcccaaagtgctgggattacaggcgtaagccactgttcccggccaggaaactatttttaaagaaaacttgattgttttaggtagataatcaggttgttttttgtttgttttgttttgagacagggtctcgctttgtcacccaggctggagtgcagtgatgcaatctcggctcactgcaacctccgctttccaggttcaagcgattcttgtgccttagcctcccaagtagctgggatttcaggcatgtgccaccacgccaggctaatttttgtatttttagtagaaacagggtttcaccatgttggtcaggctggtcttgaactcctgacctcaagtgatccacccatcttggccttccaaagtgctgagattacaggcatgagccactgcacccagctgataatcagtttttaaattaagacattttaatgtaggatatgtgctttttttgtttgcttaagtttaagttttgttttgttgtccttagaagtgctattatctagtgcaacagtttgtaaacctcttagagtagaatctttccctcaaattctgtgcagaaattcggtacataaaactgggggaagaggctgttagagtacaaaaagggacaccatgtgtatgtttatgagagtacagaagacccttccctctcagcatttcctcattccaagactgctcctgggacatctcttgacttaggtttccacagaatgcattttgaaaatcattgatttagattggagacttttaggtaggtaaatgagaagtcaaattaatgttttagaaaaataattatgaataagaaagagggagaagaaagcctcttgtgttgagattaatgtatgctataagagtcttgttttcttatttcctttggcctgcaggattatcccacctatactattcttggtcagaatcagtaccaggcctgctaccccagctccagctttggagtcacaggtcagactaacagtgatgcagagagcaccacattagcagcaaccacataccagtcggagaagcctagtgtcatggcgcctgcacctgcagcacagagactttcctctggtaagcaccgcagctctgaaaactttggcttaaggtcacttcatccaacagttgtttttaggcaatggtaaggatgattttgttctgtcttaagtcattgttaccatgcttttggctttccctctgaggtgaggagtattggaagcaggctgtgagtcattggtaggctgaatgtatacctgatgctgagaacggaacagaaaagtatcaagaactaaaagactctttctgactcgtactctaccctccctgtagctttaacccacttgccacagggagcttcagcatgttataatattttgtaaaagttggaggactccagttttagtcttgcgcaggttttgaactgctgctaaggcctcagagccatagttctttctatgtccaggatccctttaagattctgaggaaagcatggtccttttccctcagagaaatatatacaatttaacctacaatttcagtatgctcacagctctgaagtgtatcaatgaattacagtgtccaacttaaaaacctttgacataaaagattagacacacatttaataaacatatatatacacacactttttatttatatttaatgaaaatttggtagttggctttcacatcatgtggttcgaggaaagcactgtttatcattggcactgatgcatgtttagaaacagtactatataacaagtgaacagttttctgtgcggtcaccctaccagtctaataagtggacatacaaatggtcgccacttcaaacttacataaatttgaaataattacaagtgttgattaaaaactaaggttttaaagtcatttttctaaatatctttgttataacaattttaacttttgaatattggagaatttcaaacatagagaaaagttgcaaggctagtgtgatgaacacttacatatccatcattcatcttcaacagttatcaacttatagacaattttgtttcagctatacatcatctagctccctccccagattccaggcattgttctctaaaagataagtatggtacttattaacataaccacaatggcattatcccatctttaaaagttcaatattaataatgtcttaattttgtattatcaagtaccaaaatgtatttgtatttccagctttctcataaatgttatgagttttgtttcccttttgtttaaagtaggatccaacccattccacagtgtatacatatttcaaaacaacataaagcatatacagtttttatcgcattagtaaatagaaataataaataaatagaaaatttgaggagggaaaattaggatccaaatataaggtccataaattgtgattggtaattatgggtattttgtgtttcatctctattttaacctataaatcctcccgtctctttttctcccccttgtagtttgtttgttgaagaaactggagtgttgatcccatactgtttcccagtctgaattttgacagttatatcctcataaggtggtttaacatgtcctgctgccttctgtattttatagtaaattggtgaatgaacagttgttttcaactgttggcaatgtatggaaacatttttggttgttacactaggtggggcggtgcttctggcatctagtgggtagatgctaaggatactgcttaaccaaacatcctataatgcacaagacatccccccacaacaaataattatctgatccaaaatgtcagttgtgccaggttgagaaactctaatctacaagtttgaccatgaagattcaggttcagctttttcttggcaaaacaacttcattgatattttcttctatcatggggtaagcatataaagtctggttataacttttctgatgttagccagtgctgatgctcaatgcctagatgtacacttcataattgcttacataaggtttagctttccaacctttatccctgcattatgactcacaagggcagagagtccactaaccctcttcctgccctgattcttatagcctgtgactcctgacaacatatgtttcactttttctttccaggagacccttctacaagtccatctttgtcccagactacaccaagtaaagatactgatgatcagtccaggaaaaacatgactagcaagaaccggggcaagaggaaagctgatgccacttcttcccaagacagtgaattagaagtatgagaagaaactgatttagttacctactttgttctttctcacttcttaagtttatcaaacatgtttttgaagctcacagagataatgtgcactatgttatgtgccctttaattcctgagcaaaataaactaaattggccacgttaaaagaaaaatgtaaaaagaacaaattattctgtatattccagaagagaacagaaacaattcatcatattcagaaagcagagggagttacaagtaaagtcatactgttctctatttaaaattttaaaagggtcaggtgcggtggcttacatctgtaatcccagcactttgggaggctgaagcgggaggatcgcttgagaccagcctaggcaacatagtgagacccccatctctaaaaatatatatatacaagaattagctgcacacctgtagtcccacctacttgggaggctgagatgggaggatcacttgagcctggcaggttgaggctgcagtgagctatgatcgggccactgcactccagccagggcaacagagtgagactctgtctcaaaaagaaaagaaatttaaaaggaaaggactagagtgcttttagccaagtttctgtaaggcgcaaacagatctggtaacttattaatgagactggtgctgatttattctgtagtgtaagtactatatgagtttattatggacatacatttgacttcatcattaaagacataaaggtcatgcagagtgctaaaattagtggagtttttgtattatctttttgttttctgttttccgtttttctatagtgctattatgtactgaggggaaaatacatatttaactatgaatccattgataagtgctcttaagacataggtgaactgagcctgtatttgaagccttttctcttttttcagaggtttggagtgaagaagaaagaaagaaaaagtaaatttctgatatatttcttaggaaaaactgataactcattttttaattgtctaaaatatacataaaatttaccattttagccatttttaagtgtacaatttagtgtcattatacattctcaatattgtctaaccatcaccactgtatatttctagaactttttcatgattccaaatgaaaactctgtacccattaagcagtaactccccattctccccttcttctaacctctggtaacctctattctactttctgtctttgacttcttattctagatatctcatataagtggaatcacagaaaatgtatccttttgtgccagacttatttcatttaccataatggttttttgttgttgttgttgttgttgttgttgttttgagatggagtctcaggctggagtgcagtggcacgatctcggcttaccgtgacctctgcctcccgggttcaagtgattctcctgcctcagcctccagagtagctgggattataggtgcacaccaccatgcctggctaatttttgtatttttagtagagacagggtttcaacatgttggtcagtctgttcttaaactcctgacctcgtgatccgcctgcctcggcctcccatagtgctgggattacagacgtgagccaccatgccctgcctaccataatgtttttaaggttcatccatgttgtagcacataccagaatttcattcctttttatgtctgaatattttattatatgtatataccacattttgtttatccattcatctgttgatggacacttggggtttgtcacctttgtgctattgtgagtaatgctgctttgaccattggtgtacaattatctatctgagttcatcttatcaattctttttggtatatatgtaggagtggaattgctggatgctattgtaattctgtgctccactttttgagaaaccaccaaactatttttcattgtggctgcacggttttatactcttaccagcgatacataaaggttccagtttgttcacatcctcgccaacacttgttatttcccatttttttgataatagctattctaatggatgtgaagtggtatcttattgtggctttgatttgcatttccctagtgcagtggcacaatctcggctcattgcaacctctgcctcccaggttcaagcaattcttgtgcctcagcctcctgagtagctgggattacaggcacatgccaccacgcctggttaatttttgtatttttagtagagacggggtttcaccatgttggccaggctggtcttgaactgctgacctcaggtgatccacccacctcagcctcccaaagtgctgggattacaagcatgagaacctttgcccacttttaaactgggttgtttggtttttcattgttgagttgtaggagttctttgtatattctatattaatattctagaatattctagattattaatcccttatattaatcagatatataatcttcaaatattttctcccattctgtaggtcgtcttttcactctctcaatttttgtgctttgaagcacaaaaatttttaatgtttaggaagtctgatttctattattgctgtgcttttggtctaatacttgttgtttctttttgttttgttttgttttcttggtgtaatacttaatacacggttatgaagatttttatgtattttttctgagattttcatcgtttagctcttaaatttaggctgttctccattttgagttagttttgtatatggtgtaagataatggtctaactttattattttgcatatggatatccagttttcccagcactatttgttgaaaagacgttccttattgaatggttttggcatcctattaaaaattaacttatgatgttggctgtaggttaaatactaaaagaaggtaaaaaactaaactaaaaaaagaaaaagaaaaattgatcatatttgtaaggctttatttttagactctcggtttatttcattcgtctctatgtctatccttatgctagtaccacactgttttggttactgtaagttttgaaatcaggaagtgtgaatccttcaactttgttctatttcaagacagttttggctatttggggttccttgagattcataagaattttagaatgcaattttctatttttttaaaaaactactattggattttgatagggattgcgttgaatttgtaggttggtttgggtagtattgtcttctttacaatattaagtcttctaatccatgaacatggatgtctttccgtttatttagctatgcctacttggttaaatttattcctaagtattttctttttgatgctatcacaaaaggtttttaaatttccttttcaaattattcattgcaagtatatagaaatacagctgattggccgggcgcagtggctcagtctgtaatcccagcactttgggaggctgaggtgggcagatcacaaggtcaggagttcaagaccggcctgaccaacatggtgaaaccccgtctctactaaaaatacaaaaattagacgggcatggtggcaggcgcctgtaaccccagctactcgggaggctaaggcaagagaactgcttcaacctgggaggcggaggttgcagtgagccgagatcgtaccactgcactccagcctgggtgacagagcaagactgtctcggaaaaaaaaaaaaaaagaaagaaagaaagaaatacagctgatatctgaatttatttattagctttaacaattttctctgggttatttaaggttttctacatataagatcacatcggccagggacagtggctcacgcctctaatcccagcactttgtgggcagatcacctgaggtcaggaatttgagaccagcctggtcaacgtggcaaaaccctgtctctactgaaagtacaaaaataaaaaaaaattagccggacctggtggtgcacacctgtaatcccagctacttgggaggctgaggcaggagaatcgcttgaacctaggaggtggaggttgcagtgagcccagattgcaccactacacttcagcctgggtgacagagcgacactctttctcaaaaaaaaaaaaaaaaaaaaaaaagattatgtcatctgcaaacagataattttgcttcttcctttccaaattggatgtctttttcccctttcttgccaaatctctctggctagaacttccagtactatgttgaatagaagtggcaaaaacagacatccttgtctcaggagtaaaactttcagtctttcaccactaggtgtggtactagttatggatttatttttatttttatttattttttatttattttttggagatggagtcatgctctgtcacccagtctggagtgcagtggcatgatctcagctcactgcaacctccgcttcccaggttcaagcgattctcctgcctcggactcctgagtagctgggattacaggcgcgtgccaccacacccggttaattttttgtgtttttagtagagatggggtttcaccatgttagcgaggatggtctctatctcctgaccttgtgatccacctgcttcagtctctcaaagtgctgggattgcaggcgtgagccaccgcgcccggctagttatggattttttatatatggcctttatcatattgataacattcccttctatccctcatttattgaaaaaataataaactaggaatagaaagggtgttgaatgttgtcaaatgcattttctgcatcagttgagattatcatgtagctttttccccctctgttctattaatgtgatgcattactttgcataatttttttttccaataagccttttgcactcctaattaattttttaatgttgaatgaaccatccttacatccttatgttctgagaactaatctcacttggttatgatgtttaattctttttttttttttgagacagaacctctctctgttgcccacactggagtgcagtggcacaatctcagctcactgcaacctctgcctcctgggttcaagtgattctcctgcctcagcctcccaagtagctgggactacaagtgtgcaccaccacacccagctaatttttgtatttttagtagagacgaggtttcaccaggttggccaggctggtctcgaactcctgacctcaggtgatcctcctgccttggcctcacaaagtgctggaattataggcatgagccaccatgcccggccatgatgtttaattcttttaatatgctgctgaatttggtttacctctattttgtttagttttatagatgtgtggttttttgggggttttttgttttttgggttttttttgagacaggttctcacttcgttgcccagactggagtgcagtggtgtggtccctgcacactgcatccttgacttcccacgcccaagtgatcctcccgcctcagcctcccaagtagctgggactaccggcatgcaccaccggaactgggtaatttttgtgtttttttgtagagacggtgttttgccatgttgtccaggctggtctcaaactcctgggctcaagcgatctgcctgcttcaggctctcacagtgctaggtttacaggtgtgagccactgtgcctggcctgttgagtatttttatattgattttcacaagagatgttggtctgtagttttcttacagtgccttagtctgactttggtatcaggataatgcctcattgcattagtcaggaagtattccctcctcttcctttttttgtaagagtttaaggaggattcgtgttaattctgtaaatgtttggaagaactcaccattaaaaccatcttgtcttgggcttttctttgttgggatgtttttaattatgcattcaatctccttactctagttatagctcttaccggattttgtattccttcttgagacagttttggtactttatgctatgtatttctaggaatttgaccatttcacctgggttatccaatctcttggtatacaactgtgcatagtattctcttgtaatccttatttctataaaactggtagtgatgtccccactttcatttctgattttagtcatttgaatcttcttttttttcccttagtcaatttagccaaaggttgtgaattttatagatattttcaaagaaccaactttttgtttcattgatttttctctgttgtttttgtagtctctcttctatttatctctgctctagccattgttatttccttcctactgctagctttatgtttattttgctgtttttctagtttcttaagatatgcaattaggtcatagatttgggatcatttgtcttttttaatgtatgtataaaatacatatatatatgtaaaatgtaatacatatatataaaataagctataatttttcctcttagcactgctttcactgtattccacaaatttaatgttttatttctgttttcattcaactcaaggtatattctgatttcacttatgatttcttctttgacgcattggttgtttaggattgtattgtttaattcctacatatttatgaatttcccagttctctttctgttattgatttctggtttcattccattgtaattggaaaatatactcattttttatattttctttcctcagcgggtatttctgtgggacttggatgaaaccatcatcatcttccactcacttcttactggatcctatgcccagaaatatggaaaggtaatttgagtcttctttgttgtaactgtccctcttctgactatatagtcagtccctcttctgacacataacaaattatttctctgctacccctgttggctggcttttcactttccatgtaaaacttcaacaaatggcttgcaaatggcttgtattaggcaggctacatggtcaggcagaattgatggtaaagtggtaaagttagaaactactagaaccaatgctgaaagctgaagttgtaggagaatggcattttgtgaagattaaagtatagaaatgaggctcaaaatagagcagagtctcaagattatattaataaattccagaggctgatgtcttattccttaacacacttttaacagcccaaattgagcattttatttagccaaatatatgccagatatatataagtaaaatatatagataaaatatctttctaaaatagattaatccctttttaaactaaatacaccaagcaaaacttgttatatcttcagtgtacatatcagttttaacagaaggatgggctgttttgagactattaggctgtgtatttctattctaaattacctccaagctcatgtttttcagtttatatgaataaattttatacaaatatctgcaccccagccaggtgcagtggcatgcacctgtagtctcaactactcaggaagctgaggtgggaagattgcttgagcctaggagttcgaatccagcttgggcaacttagcgagaccccatctctaaaaataaaaatatttgcctcctttacctgtcctgttacttccagttatttcatatggttactaatgtttttgttagtaggtgtgggtttttttgtttgtttgtttgtttgtttgttttttgagagagagtcttgctcttgtcacccaggctggagtacagtagcatgatctctgctcactgcaacctctgcctctcgggttcaaatgattctcctccctcagcatcccaagtagctaggattacaggtgcccgttaccatgcctggctaattttgttgttgttgttgttgttgttgttgttgttgttgttgttgttgtttgagacggagtctcgctgtgtcacctgggctggagtgcaatggcgtgatctcagctcactgcaagctgtgcctcctgggtccacgccattctcctgcctcagcctccccagtagctaggactacaggcgcctgccaccacgcccagctaattttttttttttttttttttgtatttttagtagagacagggtttcaccgtgttagccaggatggtcttgatctcctgacctcgtgatccgcccacctcggcctcccaaaatgctgggattacaagcgtgagccactgcgcccagccctaatttttgtacttttagtagagacagggttttaccatgttggcaaggctggactcgaactccagcctcaagtgatccgcctgcctcggtcttccaaagtgctgggattacaggtgtgagccactgtgcttggccaggaggtttgtgttttttttttctcctgagataatatctcgctctgtcatgcaggctggagtacagtggcgcaaacacagctcactgcagcttcgatctcttgagctaaagcaatcctcctgcctcagtcctccaggtatctgggactacaggcacatgccaccatacccggctaattttgttttatttttgtagagatgggatctcgccatgttgcccagtctcatcttgaaatctgaggctcaagtgattctcctgcctcagtctcccaaagtgctgtgattataggcatgagcttctatacccagcctctgttagtattttctacaggcttttagtgtctagtctggcatgctgacataagctatataactaaactgattataaaaatatataaaattaaaaaaattatatatatatttataaaataagaccaggcgtggtggctctcatctgtaatcccaaaatgtgtataaaaattttatatattggccaggcatggtggctcacgcctgtaatcccagcactttgggaggccaaggcgggtggatcacctgaggccaggaattcgagaccagcctggccaacagggtgaaaccccatctctactaaaaatacaaaaattgccgggtgcggtggctcacacctgtaatcccagcactttgggaggccgaggagggcagatcagctgaggtcaggagttcgagaccagcctgaccaacatggagaaaccccgtctctactaaaaatacaaaattagctgggcgtggtggcacatgcctataattccagctactagagaggatgaggcaggagaatcgcttgaacctgggaggcggaggttgcggtgagctgagatcgcaccattgcactccagcctgggcaacaagagcgaaattccgtctcaaaaaaataaataaaataaaataaaaattcaaaaattagccgggcatggtggcacatgcctgtaatcccagctactagggaggctgaggcaggaggatcacttgaacctgggaggtggaggttgcagtgagccgagatcgcgccgcagcactccagcctgggtgacagagcgagacttttttttttttttttttgagacagagtctcgctctgtcacccaggctggggtgccatggtgcgatctctgctcactgcaagctccacctcccaggttcacgctattctcctgcctcagtcccctgagtggctgggactacaggtgcccgtcaccatgcccagctaatttttagtagagatggggattcaccacgttagccaggatggtcttgatcccctgacctcatgatccacctgccttggcctcccaaagtgctgcgattacaggcgtgagccactgcgcctggcaaaaaaaaattttatatatttacatatacacataatattatttcatgaaaaacagttttttacattataaacaaacactaagcttcatggtgaaatttttggctttgacatttaagttcacctttgagctgaagaagatataatgggaagagcacaggactgggagtcagaagacctgaacgtgaaaatacaatgtatatatcttgtatcatatatattattatataaaatatatattaaaataatgtaataagtatattcatataatatgtgaatatatttacatagtgatatagtttatataaattatatattactgtgtatatataatgtatatatcttatataaatatatacagtgatatagatatgtgtataaatacacaaacacacgtacacactttgagacagagtctcactctgtcacgcaggctggagtgcagtggtgcagtctcagcttactgcaacctctgtttcctgggttcaagtgattctcccacctcagccttccaagtacctgggactgcaggtgtgcaccaccatgcccagctatttctgtgtttacttttgtagagacatggtttcaccatgttgcccaggctagtctcaaactcctgggctcgagcagtccacctgccttggactcccaaagtgctaggattacaggcgtgagccactgtacccggccaaattttattttttgtggagacgggggtcttgctttgttgccccagctagtctagaattcctagccttaagcaatcttcccgcctcagcctcccaaagtgctgagatgacaggtgtgagctagctaccttgcctggtcagcattgtatctttttaaaaacatattttctggccaggtgcggtggctcacacctgtaatcccagcactttgggaggccgacgggggtggatcacaaggttaggagatcaagaccatcctggctaacatagtgaaaccctgtctctactaaaaatacaaaaaattagccaggcgtggtggcggatgcctgtagtcccagctactcgggaggctgaggcaggagaatggcatgaacctgggaggcagaacttgcagtgagccaagattgcaccactgcactccagcctgggcgacagagtgagactccgtctcaaaaaaaaagaaaaaaaaaatcatattttctgtcctcatttatctttatgaaactactaatttctagaaactaaagtcctgaaatttttaactgtccatatcttctctattttacaatcctggattctcataactgtgaatgaaattgcatcaatgatagtttgaagcacagttgggagctcgtgtgttttggccttgacctaaaataattttgaaatttgaagattagaaccaggactgtgactaccaagtcaagctgattttttcttattgtcttctaggacccaacagtagtgattggctcaggtttaacaatggaagaaatgatttttgaagtggctgatactcatctatttttcaatgacttagaggtaagcattttaaattgtttctgtgcttcactgagacacttcattcaataactatttagagcttttgcttattatattagaagatatgtgtttagatagggtggatatggagaggccagctggccactaaggcatacatacatagtcttagagaaatagtacttgtggttgggtcaccacagttttggttctgacattcaattttattggctcaaaaatttgatttttgttagtttatttggaggtgatctagcactaggggaaaggccaacccatcaggcaaaacactgacatataaaccaatattctaacttaataatctatattaaataatatatataaagtgagtttgattatttgtactctcaattatgttttgacttttcttccattttacattcttaaaggatagtctcctgatttgtcgaatctataaatggttactctaacccatcatattttatacatatttgttgttcatatgtaggttaaccttgatattcagaataattttatagttaggtgccagaaaaaccaggaaacactaagagcttcatggtgaaattttttggctttgacatttgagttcacctttaaggtgaacatggtgtagcagaaggagcacaggacagggagtcagaagaccagaatgtgaatctcacatagggaaagttatgttcccattctgggcctcagttatgcagtcatcctacacaggaaactaccaacactgattaccatctatggagagggatgagttgccaggacacaaaggtgggagggagcacacttttcacttcatgtcctttgaattttgagctgtgtagtacatgttttacctagttttaaaaatagtgaaaattttaaagtaaagtaatataggattttataggctgggcgtggtggctcatgcctgtaatcccaaaactttgggaggccgaggcgggcagatcacttgaggtcaggagttcgagaccagcctgagcaccatggtgaaaccccgtctctaccaaaaatacaaaaattagccgggcatggtggcgcacacctgtaatcccagctactcaggaggctgaggcaggagaattgcttgaacccagaaggggaaggttgcagtgagcaaagattgcactactgcactccagcctgggcagcagagagagactctgtctttaaaataaaaaataaaaagatagtattttataaacacaaagtaatcatttttttaatcttttttttttttttagtaatagagatggggtttcactgtattgcccaggctggtctcaaactcctgagctcaagtgatcctcccaccttggcctcccaaagtactgggattaccggcgtgagcactgcacccagccaacacaaagtaatcccatctcttttaaaataaacgtctgttctactcaacagacaattcttcaataaattaatagtgccccgagctccagtacttttgtctaaactccataatgctttaatcttccctcaacttcatatgttgataaattaggacatcatagtttttattcagcaaacatttattgaaaacctactacatgccaataattattgccaattgtatttgtaatgattttctagacatagtcctcactcaggaactgaaagttctgtgaagaatttgacctgaatgtgttcctgccccccaggtcagtgcttctcaactttagggggcataagaatcacctggggagcttcttaaaagtggagattctaggacttcactctcagaaattctgattcaagtaggtctgggatggacccaagaatatgcatttttaaaaaacttccccagaggattctgatgcaggtaccctaagtggtatcagaggagtacatccatcagttaggtagtgggcggcattttatgtcagtagtagcatgggcttggtggaaagaaccttggattagaagcgggggaaaaaaagaagcagaaaacctgggttatttctagtctctttctgccactcactaattgtatgactttgagaaaatcatttcacctcacttttaaaacatgaggagattgatttagatgacctcttctaactcctgactttgaagttagaaatttcagtcattctcggttttgataccacactaccagcgtctgttttgtctataaaaatttattgggcacaacctacgtaaggatactggactagatcagagagatgcaaaggagatgtgagatgtggctcctgccccaagagacctgcattgtaataggacttacagtctggtgtaggacataagaacatttgaagtgtaagggagcttgtgcttattcccatgagctgttggagaaatgaaatattgagataggagtagaaacaagggatgggatagttacagaactcatgaagactgggatgtgaatcaggtcttaagaggaattggacagcaaggggtgtgagagtgatcacccacacataagagattccataaggcatttcattatcctgccactgtatatggtctttttatagtatgtcatgatggtaatatcacttctactccctggactgaagtaatatgttttgtcttttaacaggagtgtgaccaggtacatgtggaagatgtggcttctgatgacaatggccaagacttgaggtgataaacataatgattcttgaacaccagtacacctgttatgtgcaagatctgtctgtctaggtttggaggaaaacaaagataaatagaatatatctctgaaagagctcacaacctgttagaggacatagaaacaaacatagttaaccgtgatgtatagtgtgagaaggtgacaatagaaaatgccgtggagcacgagaagaaagaattctgttgggatagggagtgggtagtgccaacactggagaggtttctcagtggagtagcattaaagcagaacattaaagaatgggtagcaagccaggcacagtggctcacacctgtaattgcagcatcttagaagcgcgaggcaggaggatcacttgagtcttggagttcaagaccagcctggacaacacagggagatcccatctctgtaaggtagtcttccacattttattatagtgaaagttaaaccaaggagatctcagtggcaaaatgcttgctcaggctcctcattcctctttgttctggcccactagccttagctaagaaagatccaaaaatttatctagcttaaagacttataagaaaaaaacctgtcacatcttttcatattagtttgtttgaatgtttatccctttttataagtaaaatgttcttcccagtaactaccccaaaattcagtgttctatccaccagttctcaaatacggagtagaactggacataccaccttaataaggacctagtcaggtagagctgagaatattggaaggtttcactttcaggtacagcatccagttgtacatgttgtggtgtcacatggtcatggagggcacaattcttatgacactttactgttcttttcagggaaaagtctggtctgaagagtttatattctgctctgaaccccagttgttttttttcctcttatacgtgtggctaaccagtaattacttatcatgtcttagcagctatattttcttaagcacagaatctcactcttagcatattgggatctattttaacttttgattgaaccaagttgttcagtcatttttagatctttacttatgaaatattaatccttcctagtttgtataattgtattatctgttgctatgcaacaaattactccagagtttagtaccttaaaacagttaaatggccagatgcagtggcttacgcctgtaatcccagcacttcaggaggccagtgcgggccaatcacttgaggtcaggagttcgagactagcctggctaacatggcgaaaccccgtctctactaaaaatacaaaaattagccaggcgtggtggcatgcgcctgtagtcccagctacttgggaggctgaggcaggagaattgcttgaaaccgggaggcagaagttgtagtgagccgagatcacgcccctgcactccaacctgggtgacagagtgagactccgtcttaaaaaacaaacaaataatgaaacatttatcctctcacagcttctgtaggtgaggaacttaaaagtgacctagctagtttttctttttaagaaatacttaatattttttattttattttaatttattcattttattaatatttactcaatttctttgttcatttttattttttatttttggctggagtgcaatggcaccatctcggctcattgtaacccctgtccctggcctccctcaagcaatcctcccaccccagcccccaaaatagctaggaccataggcgcatgccaccactcctggctaattttttgtatttttagtagaggcaagagtgccatgttgcccacacttgtctcgaactcctgagcttaagcaatctacccacctcagcccctcaaagtgctgggattacaggtgtgagcaactacacccagcttgtactcattgtcttttttttttttttttttttccttttaagatagggtctcgctctggcacccaggctggagtgcagtgttgtgatcatatatggcttgctgtagcttcaccctcccaggcttaaatgatcctcccaccccagccttctgagtagctgggcccacaggcgcatgccaccatacccagctaatatttccattttttttttttttagagatgggggtctccctgtgttgcccaggctggtctcgaactcctggacccaagtgatcccccctcattggcctcccaaagtgctgggattatagacatgagccaccacacccagcctacttaaaggattttaaatctagaaaatctattgttaatttattttttcactgttacaaattttattttgtcaaggtaaaatatacatatacatatagaatttaccatctttatcattttttaagtgtacagaagtggttccttttttttttttttccaaagagacggggcctgctctgttgcccaggctaaggtgcaatggtgcaatcatagttcccaatagcctcctgggctcaagtggtcctctcacttcagcctcgtaagtagctaggataacaggtacacaccaccatacctgactaattaaaaaatttttttcttagagatgggatcttgctatgttgcccaggctggtctcaaactcctggcctcaagcaatcctcccatttcagcctcccaaatagttggaattacaggcaccagccactgcacctggccaggggtagttcttttccccccgcaagctgaagtgcagtggcgtgatcttggctcattgcaacctctgccttccaatctcaagcgattctccttcctcagtctcccgagtagctgggactacaggcatgcgccaccacacccagctaatttttgtattttttgtaaagacagggtttcaccatgttggccgaggcgggacctcaggagatccacccgcctcggcctcccaaagtgctgggattataggcatgagccactgcattcagccccagaggtagttctcaattagagtttctggggttgaaatcaagatgttggctagagctctaatcatctgaaagcttaactggagctggagaatgtgcttccaatctctgacatgtggctgatgacagaaggctttagttcctcattacacatacctctccatggggctgcttgaatgttctcacgtgacagctggcttcttccagagcaagtgctccaagagagagcagaagaagcctagtctctgaagcctaacactatcagttttatcactttctatttatattttaagtatagtccatacccaaggggagcagaattagaagagaggaatatcaaagaatttgtagatatattttgaagctaccacagtgacctatgaacataaaccagccagcagatcacttaaggaaatatctgccattatcttaccattgttagcattttagcctatttcctttcattattttttcatgtttctcctttttacatagttgcaatcactgtgtgtgtaagtgtactcacaaaattttatattctgcttttttcactgtgtggttattttctgtcattagtgaaaaagatgccttatcccaagtcaacctctaaggaatgctggtgcttgaattgtttctacctttcattccctctctcatttcagtcctttctttgatagaagtaataagtgtgagatagagaactaatgaaagatagactctgacatacagagattaaggaagaagatccttaaagccattggccttatttatcagataccaagaacccaaccaaatagcactcaaacaaaaactttatgctgtataaattttaatttttattatcttctctccttgcagcaactacagtttctcaacagatggtttcagtggctcaggaggtagtggcagccatggttcatctgtgggtgttcagggaggtgtggactggatgaggaaactagctttccgctaccggaaagtgagagaaatctatgataagcataaaagcaacgtgggtggtaagtgtggcatataaccagtctgattctctgtttcttcctggtttcctccttttctttccagggattccttagattccccatgacaactgcttataaattatgccacagttatatgttaaactctgtatttaaaaaaatagaggtttggttgaaaccttttgggaggaagctctatatttctaacgggcttctctaagcataattttggaaagttctcttgttgtctttggacaaatgcctttttaaaggaaacatgttctgtagattatgtttgatgacatgtatcacaactgctgtcaacgctagttaatagggtgccacatttttttttttggctggtttatataactatcaggacaagttaagtagaactagctagtaacttttcgtggacagaaatctaggtccaggattgtaggttggtagtatcaatgtgttgtgatttaaagaatcttggaaattctttctgaccagaaatatttcaaatgccagatgccactaagcctaaaattctattatttagaattaattaatcatagattgtttgaattaaaagagacagaagtctaatctgaattcctcattttacagttgagaaaagtgatgtccatcataggggtagtgggggcagcttattcatggtcacattgcaaatttgtaaccataccatgtttgaaattcacattccctaactttttggtccagtgcactttcatgcagctccttttatagtgaggtactcttttgagaaaatatttaaaactgtaaaccatcaccatcaaagatacaaatacatacaaaatgttgctcaaagattcagggattacatagcctgcctagagcaggggtccccaattcccgggcctcagactgataccagtcagcggcctgttagcaaccaggcagcacagccacatagcaggaagtgagcaggccggcaagtgagtattactgcctgagctccacttcctgtcagatcagtggcggcattagattctcataggagtacaaaccctattgtgaactgcacatgcaagggatctagttgcatgttccttatgaaaatctaactaatgcctgatgatctgaggtggaacaatttcatctcgaaacctctcgccccccacccaggtccatggaaaaattgtcctctacgaaactggtccctggtgctgaaaaggttgaggactgctggcctagaggtattttactcaaggtcaagagcccttgtactatactatgctgccttacaatatggcgcagaaagtaggaacaagactttacagatcaatttggttcatttcagttacagctctctaataccagataaaaatcatgggcttccagacttcaggaatctaatttacttttttcagattcccctttttgttgcttatttcttctcatgattcaaagccagtattttttattttggtaactccacatctttttgcattttctttctcacaaacattagcctttcttttgttagttttcatatacagcctgagtctctttatcttttccctgcccaatgcctggacctggtttcctgaacaaagcgatgtaaccctgtgtgagaatcctctgagcctactttggagaatagattaaaattaatggccagctgtatgttttgtacaatatgaattgatgaaagcgccacatcatgtattagttgagtatatcatatataggtactggttttgttgtcgttttgttttatccaaaatgttaagagtcatctaattctaggcttacattgtggaaccatcaatctgaaaacaaattatactccagttctcctcctcacaaaaatgccatctgcttttatggagtattactaatagaatacaggatttttttttaaccttcactgtagaaaattcagatccagatttactgcttgaatattttaactgaagtgtctgagagcaggctcccatcatatgagctctcttttgtgcttagatatctagtcttgggtagtgttttagtgtcttatcagttggagttgtttcagaagtacagtatggagaattagtcattcaacctggaatttcatgtcaacatgttctgaagcaagtggacaagtagtcaccatggaagttctgtggagtagtggaaagacttcttaagaccaaaagctgcaaacttactgtgtaatcttagggccctttttttcattgggtttcgtttctttacagagagattagaaatgctaaggactcttctagctgtaacactaatttttcgcactttggttcttgatgtcatgttctaagcagtgcaattcaaagtgtggtcaaccagtctgcaaaagatatgctattggttggtgatgaaagaaggagcttgcaccagaatctaaattatttctgtcagctgattttattgttgttattgtgtccccgtaacaagatttttctaaaaatttatctttgcctgaacatccccaaaacactgtgataaagaaagtaaaaatggcattctgggtagcactactctaaggtttctccaagaagagaaattaaaaaaaaaaaaaatgccaggcacggtggctcacacctgtaatcccagcagtttgggaggccaaggtgggtggatcatgagatcaggagttcaagaccagcctggccaatatgatgaaaccccatctctactaaaaatacaaaaattagctgggtgtggtggcagctgcctataatcccagctactcaggaggctgaagcagagaattgcttgaacctgggaggcggaggttgcagtaagctgagattgcaccactacactacagcctgggcgacagagcaagactccatctcagaaaaaaaaaaaaaaaaaggacaactggtcttatcttgacaccaagaaccacacttccaaatccttgttcactcacgccaacactggcctcccgacaaattaggagatgttcaaggagaaacacgaggttgccatgctaggggcaccccatagctctgctcccttgatgtcctctgtgatccacatctgcagtgagacctccatgcccaaaccctgttcaaaatgctcttcataaactagtgcttcctgggcttcatagcattagtgtactgcatgaagtctagggacaggaagatggtgggtgatgtgaccggggcgcaggcctgtgcctccaccaccaagtgcttgaacatctgtaccctgttcctcgacatccctgtggtcattgcactcatcatgcttttcaccactagctcagtgataatcttccaagcaatttctcagaagataaaggatctccaaggccagtagtagagcccatgtactccactgctgaccctgcaccctggggctgttggtcctgcccttttgaccccacccctatatacagcagtttatattcacctgtctacaatggaattcaataaagcacatgtgttcatgggaaaaaaatacgtatatgtatatatatatatataaacatactcagtagaatatttcagtgactcacactttttaaattgaatttagaagttgctttctcactgtcagcaaatatatgttgtcaaatgataaatgtgtctgcttttattcctaaaggtctcctcagtccccagaggaaggaagcactgcagagattaagagcagaaattgaagttttaacagattcctggttaggaactgcattaaagtccttacttctcatccagtccaggtatggaaatggttcttttaggtctcatcctctcagcgacatattcttctactccagttcaggataagccattctctaaaatagggtttgggataggggtagagaggagtttaaatgatgtagggaagtatttgtgttaggtgagaagcaaggtcattttatgttaacagcacaacttctagttttaagagaatatttatatatgaaatcctttttctttctccttactttttgctcacgaaattaaaactcagtaacccataatctcttgtccataagttggacctggtgacgtcaaagaatacatggaggagatgttattacaatgtcctaggtacaggaagctccaagaaatgtatccaaacccactaaagaaggcaagattcaaaagaaaaagggtacattaagcagattaaggagatttcaacgtgaagcttagactgggaaataaatgcaccagtctgtgtctgcaccaataccctattactccctcccgcaaagcagtaattccagatccacaacgtagtaaacagtaaagctgacaccaaggagtggatatctggtgaaggtaaaggacatataaaattaatgtgtattctagaatctatgttgctattgtgtgaagagcaaagcgaacacaaatcatatctcatttatggactgacttgcattcagatgaaagagtacagctcagagctttttgttgtttgttttctaaaatatgctatcagtgacatgggttggtggtatttatcaagtacttgtgactagaatggtcagaggggaaagaaggcaagaactaagttgttgctgtgtgtccactaagataacaaaaatgagtagaatctctgccctttaatatagaaagtaaatgaacatgaaataatgagtagtagctgaacattggctctgaacagtataataccaggtcctttaaagttaatttttaataattaaattctaaagagttggcacatacgaattcttgctcccaggttggtttagtttcaccttttcttttcccttttactcccttatagaaagaattgtgtgaatgttctgatcactaccacccagctggttccagccctggccaaggttctcctatatggactaggagaaatatttcctattgagaacatctatagtgctaccaaaattggtatggtttctatgctgtttcttgtcactggccttgcaataaaactttctactcatgatgcacctattattttctagcccctcttgttagacactttatttgtaatacctacagtcctcacaacagtcttctaatattttcagtaatgcaattgaggcttagtagttatatagcttgctcaggttctcacagctagtaagttacataagcatgctctttgataatatttgaaagaacataatatctagcttagaaatctagttttgcctcatttcaagtttctctttttcacagagagtatgtagtataatagaaaaagcactaggttaaaaatcaagcttctaaactatatacctaaaaatggtggccagacaagatgaatcatacctgtattaccaccactttgggaggctgagacgggaggatcacttgaggccaggagttcaacaccagcctgagccacatggcagacctccgtctctacaaaaaagtttttttaattagctgggtgtggtggcacgcagctgtagtcctaactacttggaaggttaaggtgggagggtcacttgagccagaagttcaatgctgcagtgagctatgtgatcttgccactgtgctataatctaggtgacagaatgagaccctatgtcttaaataaaataacaggtattgaccaaaaaattagctgggtatgatggcaggcgcctgtagtcccagctacttgggaggctgaggcaggagaatggcatgaacctgggaggcggagcttgcagtaagctgagatcgcgccactgcactccagcctgggtgacagagcgagactccgtctctaaataaataaataaaaggtattgacaaggatgtggagaaattggaacctttgtgcactgttggtaagattataaaatgatgcaactgttgatagacacggtggtgcatacctgtagtcccaggtatttgggaggctgagtcaggaggatcacttgagcccaggagtttgagttcagcctgggtaatcttctgcgtaaatatctgagagaattgggtctcaggttcttgaaatatatccaaatatccaaaagcagggtctcaaagagatacctgcacactcatgtttatagcagcattattgacaatagttcagagcttagaagcagctcaaatgtcaaatgtggatgaatggataaacaaaatgtggtatacacgtacagtgaaatattatttggccttaaaaaggaaggaaattctgtcacaggctacatcatggctgaaccttgaagacatgctaaatgaaagtgaaaataagacaatcacaaaaagacaaatactttatgattccatttatatgaggcttctaaagtaatcacatgcatagaactgaaagtagaatgataattgccagaggctggaggggaagggaaatgggaattgttcaacgggtatagagttgcggtcatgcaaaatgaaaaggttccagacatctgttaaataatagttaacatgacagaactttacacttaaaaattgttaagaggccgggtacagtggctcacacctgtaatcccagcactttgggaggctcaggtgggtggatcacaaggtcaggagatcgagactatcctggctcacacggtgaaaccccatctctactaaaaatacaaaaaattagctgggcgtggtggcactcgcctgcagtcctagctactcaggaggctgaggcaggagaatcccttgaacctgagaggcggaggttgcagtgagccgagattgcaccactgcactccagcctgggtgacagagtgagactccatctcgaaataataataattgttaagagaagccaggcacagtggctcacgcctgtaatcccagcactttgggaggccaaggcaggtggatcacttgaggtcaggagttcaagaccagcctggccacaatggtgaaactctgtctctactaaaaatacaaaattagtcgggcatggtggcgtgagcctgtaatcccacctacttgggaggctgaggcaggagaattgcttgagcctgggaggtggagttgcagtgagccgagatcgcgctactgcactccagcctgggcaacagagtgagactctgcctcaaaaaaaaaaaaaaaaatgttaagagagtaaattttatgctacttttttttgagttggagtttcgctcttgttgctcaggctggagtgcaatggtgcgatcttggcttaccgcaacttctgcctcccaggttcaagcgattctcttgcctcagcgtcccaagtagctgagattacaggcatgcaccaccatgcccagctaattttatatttttagtagagacggggtttcactatgttggtcaggttggtcttgaactcctgacctcaggtgatccatctgcctcagcttcccaaagtgctgggattacaggcatgagccaccgcacctcgccaaaattttttgttttaaagattagtgaatttcatgttatgcatattttaccagcttttttttttaaaggaaaaagaaaataaacatcaaggacaaggatttaagtcctggcctccctactactagctctcaccttaggcagattatcttctttcctgagcctcagttttctcaagtaaaatgagatcttagaagtgagtacaggccaagtgtagtggctcacacctgtaatctcagcactttgggaggccaagacgggctgattacttgtggccaggagttcaagaccagcctagtcaacatgatgaaaccccctctctactaaaaatacaaaaactagctgggcttggtggcaggcgcctgtaatcacagttactcgggaggctgaggcaggagcatcgcttgaacctgggaggtggaggttgcggtaagccgagatggcgccactgcactccagcctgggtgacagagcgagactccacctcaacaacaaaaaaagaagtgagtagagatagagaagaatagaggtctaagaactacgccctggggtcctctaatgtttggatcatgaggaagaaccagcaaaatgtgtcaggaagattgacctgtgaggcaggaggagaatgagaagaatggtgtcttgaaagaatgaaggaagagtgatcaactccttctaatgttgttgatgggtcaaatgagacccaagggccaggtacagtggttcacacctgtaatcccagcactttgagaggctgaggcagaaggattgcttgagcccgggggttcaagaccagcctgggctacatagttgtttttgtttttgttttttttgttttttaattagctgggagtggtggtgcatgtctgtagtcccggctacttgggaggctgaggtgggacaatcgcttgagcccaggtggtcaaaactgcagtgagccgtgattatgccactgtactccagtctgggcaacacagtgagaccctgtctcaaaaaaagacttgagaattgaattgaagattgtttttagatacatgaagatcattaatagctttgacatgcagtttgaataggggagtgatcgggattaaaccctaattggaagtagtttaagagagaattgaaattttatagaactggtctaacaatatttttattaggcctgttctaatatttttactaacttattagtaaatgagagagaatggaaggagagttggagaagggaactatacaactctttagaggaggtttgtttggagaggaacagaaaaatgaagtagtggctctagagttatatggacttcagaggatttataagattcataagagaaattatatctattttatatgcagatggaaacgatccactagatgaggaaaaataataacggtgcttattgtgtgctaggcaacgccaaggcactaggaatacagcagtgacaaaagtcctctgtcctcatggaacttaccttcgatcagtggtgctaagataactggattatccatataggaaaaaaggcagaattgttttccttctttatgttatatgcaaaaataaattacaggtagattaaaaacttaccgcaaaaggtaagttttttaatttttaggagaaaatatagaagagtatctgtgtgatcttaaggtgaggatgggcctcttttaagaatcaaaagatagtataaaaagcaaaaaaaaaaaatcattgattgcatggaacttttaattttacatacagttaaatataacaaagtgacaagctgggcacatgcctttaattccagcactttgggaggccaaggcatcacttgaggccaggagttcaggaccatcgtgggtaacatagtgaggccccatctctacaaaaataaaaataaaaattagccgggtgtggtggtgagtgcctgtaatcccagctactcaagaggctaaggcgggaggatcacttgagcccaagagttcaaggaggctgcagtgagctgtgactgtgccactgcactgcactttagcctgggcaacagaaggagaccttgtctcttgaaaaaaggtaacaagacaagcccacattttgggataaggtatttacaacacatttaattggcagttagaatacagaatctatgaagaactgccaggcttaatggctcatgcctgtaatcccagcactttgggaggccgaggtgggtggatcacctgaggtcaggagtttgagagcagcctgaccaacatggtgaaaccctgtctctactaaaaatacaaaattagctgggcgtggtggcacacgcctgtaatcctagctactggggagactgaggcaggagaatcgcttgagtgggggaggcagaggttgcagtaagccaagattgcgccattgcactccagcctgggcaacgagcgaaactccatctcaaaagaaaaagaatgcagaatctataaagaattcctgcaaatcagtaagcaagagacaattttgaatatagaaaaataggcaaaaaccttgaaacaaccagtttgccgaagaggaaaacaaaactgtcagtaaatatatgaataagtccttaacctcacaaattaaggaactgcaaatcaagaaaatgcaaatttaaatgtggtacattctccaaccatcagatagacaaaaacttaaatctaacaatgtaatgggaactctgcctctgcaagtgggattgaaaatggatataacctgctttggagaacgttaatgtctaatgaagtttgaggtgtacataaccctatgatcatgcaattccacttttaagatatatatatactttagagcaggggtctgcaaattacagtccatgggctaaatcctaccctctggctgtttgtgtaagtttttattgaaaccgtgcccacttatttatatagctgctttcacactacagtagcagagctgaatagttgcaacagggaccatagggcctgcaaagcctaaaatatatactatatactctctgactctttacagaaaaagtttgctaacctctacctttgagtaattcttacatgtacaaggagacatgtacaaggatttttttgatgcacacttgcttatcatagaaaataattggtctgtaaacctgtccatgaacagaaaattgatagatatattcaaacaacagaatgctatattgcagttaaaagtggattaagtaaaattacatatactcataaggattaatattaaaaacaataggccaagcgcggtggctcacgcctgtaatcccagcactttgggaggccagggtgggtggatcacctgcctggccaacatggtgaaaccccatctctgcaaaaaatacaaaaattagctgggcatggtggtgtgcgcctgtaatcccagctcctcgggggcctgagaatagcttgaacccaggaggcggagattatagtgagccaagattgcaccactgcactccagcctggacaacagagcaagactctgtctcaaaaaaaaagaaaaactgatgaacaaaaaacattgcagacagataaatgtacagtatgtaatatctatataaagatttaaaatatttacattttaggagtacttgaaaagttttgttctgtaatgtcttgatttttttttttttttaatctagagcaactataagggtcaggtggagtggctcacgcctgtcatcccagggctttgggtggctgaggtgggagaatcacttgagaccaggagtttgagatcagcctggacaacatagtcagaccccatctctacaaaaaaaatttttttaattagccaggtgtggccaggagccgtggctcatgcctgtaatcctagcactttgggaggccgaggcaggtggattgcctgagctcaggagttcaagaccaccctgggcatcacggtgaaacccagtctctactaaaattagctgggcatggtggcgggcacctgtagtcctggctacttaggaggctgaggcacgagaattgcttgcgcctgggaggcggaggttgcagtgagccaagatcacgccactgcactccagtctgggcaacagagaaagactctgtctcaaaaaaaaaaaaaaaaaaattagccaggtgtgatggcttgtacctacaatcctaggtactctggaggctaaggtgggaggagcacttcagcccacaagtttgaggctgcagtgagctatgattgtgccactgtacttcagcctggatggcatagcaagactttgtctcataaataagtaaataaatacagcaactgtgaagtgttaagattttacaaagcttcgttggtggtaggcatttttttcttttttttttttttttgagacagggtctcaccaggctagagttcagtgatcacgactcactacagcctcgacctccctggctcaagcaaccctcccacctcagcttttcgagtagcttgggattatagatgcacaccgccatgcctaacttttcctattttttgtagaaatggggtctcactttgttgtcaaggctggtaattctccatgcttttttgtatggttgaattatttcatttacaagggattgggtggaagggaacatatatgaaagcgctcccttcagatattgttcctgctgccggttgctttatgtatatcataggaacccagagcactcactgagcctcccacatctgaaagacagattttctgtagtgcttattatactgagacctggcacccgcaggctcatcaggctaatggaaatgatctcattccctctgtcagtaagtgtgcttatttggtatttttcctcagtctcagttcatccagagctaatttgcaaagctgcagtgggatctggtgctatggtaaccacagtaggaggcttgaggcttttcttcacagaactgtgaaatgggagcaaggagaagaaatactttttcacttcctctgaaatgatagcaaaatatggttctcttaatggccattctgtgatttggggacattaaagagaattctcaaaataatttctgaaaatgtcagaagttttttttgttttggggggttttcttgagacagggtctcactctggtacctaggctggagtgcagtggcacgattatagcccattgcaaccttaaccttcccacgctcaagcgatccacccacatcagcctcctgagtagccaggacttcaggcgtgttccaccaccatacccagctaattttttaattttttgtagggaaaaggtcccactgtgttgcccaagctaatctcaaactcttgtgctcaagtaatcctcctgccttaggcctcccaaagtgctgggattgcagacttgagccaccgctcctggctagaaatattttaatagagaaaacccagggactaatattctccaaagatttggctgatcttacagttcaccagcttcaattgcttgacatatggtaaactgattaatcattggcctcatcctcctgaacaggaaagctcatatccagaaatggaagtattttaccaactgtattggagtgagtcctgttttcatggagctgcttctttactttgagctgttaataactctcttggcctcttaatccttttaaaggagacattacagagtatatttcatccttgatcattgcatgccaggacagtgaaaatgtctgtgttcttatcctcaaaatatgagttactgcctttgttgagtcttacaagaaagtcaaactgactcacttaaaaaagttttttgctacagacagatcatagtagactgtgcatctggtggaggttggcttagtttgtaaagctgtaatgggtgaaatggaattaaagaactcttcaacaccatgaacataataagaatttattattagttgaatggtttaatgtttgaactgaattgaggcataagacctggactacagtcctccactgaatcatttgtgagattaatatgaatttactcagcaaacattgattgaatccctcatatgaatgtaaggcatgacaattctattgtaaaatattagcactaaaagagacccaagtgcacctaagccaagccttgtattgtaagtggccagctgagcccagagtgatctagtgtctggtccagttgactagtccgtctgttttgaagtgccactgggttaaggatgtcaaagatttgcagttacatatctgcacaacttctgtgccaagtaggacttctgcgtatggaagtataagttctggccaattatgttacagttatcttagatttgtatatttatatattacagtgattttccagcagatggcagtcaaatgtcttgaggaagaggcagctttatcttatttacacaggaaccctggtgctaagtcactctgttgggcaaggggaaagaacaagaaggttaatagagcaggatgaagaagaaagccaaagttaggaccttgtttaactgaagaaggtggcagaagcagggagataaaaagagcaagggatataacttctttttatttatacaaataaagtatctttcccacagcagtatgatctgtgtatgttttaggtgttggttgcagatgggatttgagttttgatacactgccatgtttctcaaaactgtctgcagttctgagaaatggatttaaatcacccatttcccaaggtcaatttcagtgatgcagtatcttggttacaactacaaggtatagtaagtaaggaggttccagatatgacaaatgttgatgccatatttattggtcactgttctcagttctattctggggctgttctctcactgaaagacgtaaggcctatacccaggactgtttctgggaaatgaagaattggagggaaatggctttttgtttgttattgtttctaacaagaaatcagggccttgtgttttcacttctcttttctaccctaaaacatttcaccccaaaaatcattcattcattatgacacaatgaccagagcctagatttggagtcaggggccccaagttctagctacttgcttgtttgtgatctaggggcaagtcactaaacctattaatctttcccatttatagaaattccctcacactaagatcttagggacttcaccctcaacgtgaaggttaaaataagtttttgggttgtttgtttgtttgttttgagacagagttcgctcttgttgcccaggctggagtgcgatggcatgatctcggctcactgcaacctccgcctcccgggttcaagcgattctcctgcctcagcctccccagtagctgggattacaggcacgcgccgccatgcccagctaattttgttttttagtagagacggggtttctccatgttggtcaggctggtctcaaattcccgacctcaggtgattcgcccgcctcggtctcccaaagtgctgggattacaggcttgagccaccatgcccggccaagttattttaatggcacaacttcacattctttgggcagagggtctactggatctctagctcccatccctactccccagcaagcaaactacatgggctgtcacttagtccacctaagcacaggcaggtgaacctagcagcagccctcttctttggttttgaaaagaagagaagagtattctaacaggaaatttctttttctcatcaggtaaggagagctgctttgagagaattgtgtcaaggtttggaaagaaagtcacatatgtagtgattggagatggacgagatgaagaaattgcagccaaacaggtaaccatggtaaagaaaaatagtctatgtggttgtacatcgagtaatgagaaaaatgggaaaaactacaaaatcttagcaatctattatgcatttataatattttctctttcttcctctcccatttttctttaaagaaaaagagggtcttttttttctccagatggagtttttcctcttaagtttttagatccatcccttcctcttcctccctgtcactcaagaatcttaaaatctttaagcccttctacagggatcccatcattaaacctgagatgtgccccatcttccatcttcaaagacagtgccttctcaagcatcagacttgactgcaaaaaggctaatcattctttcttttccatgcttcaagttctcagacagtacaaccaatagctgtttctgtagagaaagtctttcctgcctttgagccctggaaagattgttctgatgttaaccccaccactatacaggtcccaacttcaggtcaccccttctttttttcttttttctttttttttctgtttttgagatagagtctcactctatctcccaggctggaatgcagtggcacagtcttggctcactgcaacctccgcctcctgggttcaagcaattttccttcctcagcctcccaagtggctgggactacaggcacccgccaccatgcccaactaatttttgtatttttagtagagacggggtttcccgtattggccaggctggtctcgaactcctgaccttgtgatccgcctgcctcggcctcccaaagtgctgggattacaggtttgagccaccacgcctggcccaggtcaccccttcttaatataggaaacaatagatgaaagagtcttggctatagaacttaaaatcccatctgtgtctcagctatgtgaatttgaacaattatcctctttgagtatcctcatctgctaaatggatctgtagaagttctttccctccctatcccaatttattttcttccagcaactctatttcttagacatggaggcattgggttgccagctagaaccaactgccctgatactcttcatccagttaagtggaaaccttagcaactataataaactatgagattggtaatcagttggcattattatctcatgttttcatttgtcactttatgtagcaattcagggatccttattttttcacatatgttatgaagctttgattctaaagtgcttcttgttgccctctttgggaaagacactagtgggtgtaggcatcaatgtttcctggtctgaagaagggtatgggggagagaacaactcatcagcagagttggtaactctgagctaatgtctttaatcatctacaacagaatacatccattgaggctgggcacggtggctcatgcctataatcctagcacttggggaggctgaggcaggcaaatcacctgaggtcaggagttcgagactagcctggccaacatggtgaaatcccgtctctactaaaaatataaaaattagccgggcatggtggtgcactcctgtaatcccagctactcgggaggctgaggcacaagaattgcttgaaccctgaaggcggaggttgcagtgagccgagatcgtgccactgcactccagcctgggcaacagaacaagaccctgtctcaaaaaaaacaaacaaagtatataccaattggaaaatgccttagcactttatccagttcaacctatactctgtgaaggatattttctgcagcctttctgacagaagtctctctagtccttgcttgaatatgcccaaggatgaggacactggttcccagtagcctattccaccgtgggatcaaccaagctgttagggtgttcccccttccactgagcaaaaatttctctaccttcacatactagtctggcattcttttttttgttttgttttgtttttgagatggagtctcactccatcgcccaggctggagtgcagtggcatgatcttggctcactgcagcctccgcctcctgggttcaagcgattctcgtacctcagcctcccaagtagctgggactacaggtgcacaccaccactcccagctaatttttgtacttttagtagagacagggttttgccattttggccaggctggtctcaaactcctgacttcaggtgatccacccacctcagactcccaaagtgctgggattgcaggcatgagccactgcacctggcctctagtctggcattcttgaacataacaagtcggtttcctcttctgtatgttaatagccttttaaatattatgtgtgagcagctgtcttgaaaaacaactagggtatatgccaaaataactgtgttctaggacctcaatattctgagtaacttggaaccagtttcaactagatgataggaaagttaatctcctcagcttcatagaacatggtttccaatacttggatttatcaaagccctcctttaaaatatggcctccacatgagaatcacctaaacctgggagtggaggttgcagtgagctgagatagcaccactgcaccccagcctgggcaaaagagtgagactctgtctcaaaaaatataaaaaattaatttaatttaatttaaaaatatcggccgggcacggtggctcacgcctgtaatcccaacactttgggaggccaagacgggcgatcatgaggtcaggagatcaagaccatcctggctaacacggtgaaaccccatctctactaaaaatgtaaaaaattagccgggtgtgatggcaggcacctgtagtcccagctactcgggaggctgaggcaggagaatggcgtgaacccgggaggcggagcttgcagtgagctgagatcgtgccactgcactccagcctgggcgacagagtgagactctgtctcaaaaaaaaaaaaaaaatatggcctccaggcacagtggctcatgcctgtaatccctagcactttgggaggccaaggtgggaggattgcttgagcccaggagttcaagaccaacctggacaatatagtgaggcttcatctctacaaaaaataaagaattagccaggcatagtgtcacatgcctttagtcccagctacttgggaggctgaggtgggaggatcacttgagctcaggaggtcaaggctgcagtgagccatgttcataccactacactccagcctgggtgacagaatgagagcctgtctcaaaataaaataaaaagtaaaatatggcctccagaacagcacacagttttctggacatgattttgactacataatataatgggattattatttcccagatctgtacattctccatcttggacatagataagatttaggtgttgcagttctgaaacttacaagaaattgaccatccatgagacagtataatcttatatcaaatactaatttttcacctgggccattttatttgatccttaagaccctgtatgataactggaatgcctgtagttccagctactcaggatgctggagtaagaggattacctgagaccaggggttcaaggccacagtaagctataatcacaccactgcactccagcctgggtgacacagcaagaccctgtcttcaaaataatagctagaacaggtaatctctcaaaagcacaaagtaccactgaaacctatttaaaatttctcacatttctaaagtgtgcaatgtacaaggtccttatgcatatgattatttgatcattataacagccctatgaggcagggatagatagggttaccatgtaccttggggagaggtgtgttgaggaaagagtatgggcaaatatttatataagctctcagaagaagttggattaaccagctattcccactctcttccagcacaacatgcctttctggaggatcacaaaccatggagacctagtatcccttcaccaggctttagagcttgattttctctaagaactggaatgaggagccttccccttgagctccttttcactcctgaagggagctggagactggaaccaactgagaactttctctgtctgtctctctctgtgtctctgtctctatctctctctctttctctctttctctctctccctctctccctccctcccttcctctctccctccctctctgcctctctctctctctctctctctgtctttatccatggaatgctggcgagaacacaatcagaaccaacagctgcaatttttgctaagagtgagctgcagccccgtgttcatctccatacagaagcagggacagttggatagagagaacaatggactcactgcagctacagtgcttttaatttttctgtgttttgtttttgtttttttgttttcaaaaaatgaaaaagaaaaggaaattcctggggcagagttgcactcttagtccatgaccagattgagaattactgataacttgtggtgatcagataaatgcagcagacttttatgataacatctcttgcagtcttagagtctccttagcttagaatctcacttatttccagcgaatgtgtatgttatttttataggtaagggtctgatctttgacgcaggtttcccccactttctttttctagcaagaaggggtgtttaaagtcttgaaaatagtaattgaaatatctaaaatacctccctgtggcagtagcacctctatagctgctccagtggtctgctctctaggatgatacctttcctgttcttctatctcctagctggtgaactgtggggcactggacactgagtaacttaaactttggcatttcccatctagaagccttagtcttctttccagtcccttttccctttagtcaaatggcacaaccctaaaaactccttcagcttgactgtcattcagactgtatcacaggaggcttagcttccaaactggagagaaggaactaaagtgtcttatgaatttcagcttcttggctcttgagaccgaaaggttctacctattccccctgcagagaagcacccatttcccatcagatgctcgtccctgcagcttcttccttcttggtcatcataatgctaggttcttacccctttcctgccctctgcacctcatgtccacctccaggcagctctggccagtccccgggtattagacccaagaattcaaatcaaatctaaaaacatgcttataactacattttggccaaaactgccaatgtatttgacttcctttgtggaagccctaagccatatgaaggatgtcccaggtatgtatttacccagatctctgcctgaaactgaagagcagattgctgtatttaaattttcccatggaaaaccctgcttctcaaatcccattctaaagtaggaaaccagaaagactttgctgattgtggggggaagggagaaacagacaggttttcacattgttgccaaggctggtcttgaacacctggcctcaagcgatcctcccacctcggcctctcaaagtgttgggattgtaggcatgagccactgcacccagccagactttcctgatttaaatgagagtactgcatcattccctacttcatggcccaaaacttaatcctgggccaaatgcaggagcatctctcgacctctgggcagattggtgggtgcccaggcactagtcacagccttccagcccagccatgattgttggatgccccatccctccaagagcaatttgggcatctactcaggcaggataaaattccctagagctgaggaagttcagcctctcccaggctacacagagagagatgatacaagcacctcagattgagatgcaggattggtccgcagaaggaggcattgttgaccaaccccagctataattgcttgtcaccagagattctgcatacccatttccagagatgttgcagcacaaagaggcaagactccttccaatgccaggccacccagatagcaagagagagaggctggtatacacattccttcagaactcattgaaaagcgctcataactcgtgattttaaggagtaagtttttgctgagtagctgaagtcagtgctcctttacttagctgcctctttggccttgtttcctgtggggttgggaggagggagatgtagtgtgaggtaggccttcccttggtctgtattcagcatagttgcctagatgctgctctgccttgtttgatggttgatcttaggaagctctaggttttactctgaggcctcaaaccctccccctatgcagtatagctgttgggtttttgtcctggacaaaggccacggctgttgtgctgcgcttcaggtttgtgaggctgcggagtggtacccccaccatgcacgcaagcacacacacacagatacttccctctccacccttttgggagctctttattttagaatgtaacttgaactcacttttatcattggcctttttcctcttactctgacttcctagcttagctctttccaaaaggaacttgaacttggccaagagaggtaaggaggctgagcagagcagtctttgctcattcctggttgttgccaccctcatttaaatggaagagagaaaacaggagcttcttggctgtttgccaaaatgaattgtccagggaacacagtgctctctgtaattaccctgcctttttctccaccccaacacaaaaatctggaaaggaaaataagtgggtaggattaagagctgttagaagctgaggaccaaaggacactgtgggtccattcatcaagggggagaccctcttcattagagtcctcatgaaattagccaaatgatgagtccttccctagctgggcatggtgggttctctttttttttttttttttttttttgttgttgttgttgagatggagtctcgctctgtcacccaggctggagtacagtggcatgatctcggctcactgcaacctccgcctcccaggttcaagcgattctcctacctcagcctcctgattagctgagattacaggcgcccaccaccacgcctggctaatttttgtatttttagtagagatggggtttcaccatgttgaccaggctgttctcaaactcctgacctcaggtgatctgctcaccttggcctcccaaagtgctgggattacaggcatgagccaccatgcctggccaggcactgtgggttctacaggatgggtctgtaatgtcacggtgagggctctctctagtagtagatctggagtgaggtgtgtcttgggttgaggaggtggcttgactttcgaatgtaaaactgactgtgccttagcatcaccctgtccagtgcccctggggcagctggtagtgtccagaagaatggacacctgctccagatttagatgcccatctgggcttttgtttgatttgcggcgttcctgtcttctgtaaagctagtgagttgtcccaagagactgatgccacagcttgttcgcagtttacacaaactcagctttaaaattccaaatagaatctgacttgcaaactctagctgcagcatgtggagcttctagatgtttactaccttgaatggttgtcagtgtcactgaaccacaggggagaggagtatggggtagagcaatggtctgggccaaggaatggtgagcttagggtcttcctctgactccttactcctcaaggaggcagttagggtccctcttaagcaggcttctatttcttaccactaaattggtttcctttttcatccagaagttagaactccccagatattcacactataggatctgaattccgagattctaaaatatcttaaaccacaagagagaaaatctagttctgcctcagccccagtcagcaggccatctgtcccttcctctcctctgagtcagacagctctggcaagcaaggctccttggctagttcctaatgcactgacaggagccctcccattaaggacgacttctactcaaaatgcgactctccctctgaacttcagatgcctctgttagcaggaaaaggcattgattggattggatatatttatgtgactgcgggcatttgtggctgtagaatccgtgaccgtaatgttatatgtaatgggaactatcttataaacttgaaaaaaataaagtttttattttctata

SEQ ID NO: 455 - DNA, 38401 bp, Homo sapiens
  source 1..38401: mol_type = genomic DNA; note = NC_000001.11:c25998164-25959764 PAFAH2 [organism=Homo sapiens] [GeneID=5051] [chromosome=1]
tgaggaacgagaagtgcttccaagcgtccattttgagccttggaaactacgacgaccaaagggccacgggttcatgggtcgtttctcatttccgtcgagttaaacgtctggggctgcttctgaggaatcagcttgactgggtaagtttgattggagaaaacacctatatctcaattgagcttcctgcagacttttgtattctggcccggtttggggcctcggcgtctctcagtcataggaattgcacattaatcttcgtcctttacgtttcctattcagacacctgtagccacccgctcccttgaccctcccacggtcgcctcgcacttttaacggccagtgcccctggaatccccactgagctcccgtcccaggacccagcccccgcagccccaccttggaccccacagccctaccctgattcctcggccctaccttcaccctgcagcctcacatccctgaaccccgggcttctttatgctcctccaccctttgtgtactttactcttactctcagttttctgtttttcatggcggtggaagaagggtccccattccttctttccgatccgcgattaccctggactcgaagtcagcagacccggttctaggccagctctgcctctcaccctctgtgaccttgggcaaatcatacaactctgggactcagtttcttcctctctaaaacggagatgactgttgctccatcagtctcaggtgaggagtgttgaggagccaacaagctagtatgtgtgaagatgccttgtaaactgtaagaccttcacaagagacagagattatttttatcacaattattaatgctctggaacactcttatcaggcctcttctctagctctgccaccttgttgctcaatctcatccctcgagtgcttggtgtcttcattgtctacgagctggatgatatttcctcacttcctccagagaccaaaggtcaggccaatgagcttttagtcttcagagagctttgtctgaaaggaagcacaagagaagtgcttatcttggactgtatcttgaaatagccagtgatgaaagtgtcacacagctggcagagcagcagtcctctgctcaccagaaacagggtcccagcaggagaggacagctgcaacctaagccccatccattccctctgggctcctctgggcctgttcagtagacactggctttggtaggggtgtctgaggcctgaaaaggctgctgggaaagaatctgttttgccaaagggcttaatccaggaaaaatgagagaccttggctaggaaagagagacatagcattgttaattagttcctaacattttataagcactgaaaatgcaccaggccctaggcaatattttcacttacgaagtatccattttacgtataaggaacttgagaggcatgtagttaaaataattatagttgcctcctatggttatagtaccttctatccatcgagtgctttacatgcattatttaatcctcatcaacaatctcgtgagtagttactatttctttttttttgagatggagtctcgctctgtcgcccaggctagagtgcagtagcgcgatctcggctcactgcaagctccgcctcccgggttcacgccattctcctgcttcagcctcccaagtagctgggactacaggcgcccgccaccaggcccagctaatattttgtattttttttagtacagacagggtttcaccgtgttagccaggatggtctcgatctcctgacctcctgatccgcccgcctcggcctcccaccgcgcccggcccatagttactatttctttttgagacaagacctcgctctgtcacccaggccgaagtgcagtggcacaatcttggttcactgtggcctccggctcccaagccccagcaatcctcctacctcagcctcctgagtaactgggactgcagttgcataccaccacatccagctaattttttttttttttaatttttttatagagacaggattttgccatgttgcccaggctggtcttgaactcctgggctgaagcaatccttcccatttgatctcccaaagttctgggattataggcatgagccactgcgtctggccatagttattatttctgttgtgagaataaattatcagaagcttagagtttgaggaacttgttcaagatcacacagctaataagtgacaggggtagaattcagagtcatcaaaacctttgtcccccattatttcatatagccttatttttagatcaaaaacaaagattaaagaagacttgagatgggtttaaatcatagccaaatgaaggaacatttattgagtcccaactatatggggaaagcatgcagatagacagtttggtctacaaaaaaatataaaacccaatctttacccccggagtagatctgaagagatgaggcataagtgtgccaaaaattaaatagtattcattggataaattaattattgagaccagctatatgcagggcactacattaagtctagtgataggaacatgcttctgggtggccatggggattatagcaagtgaaatcgtagtcgtgaaaatgtggaccagaacacagtatatactcagtaagcgtctgctgcatgcatacgtgtctgaatgaaagaaaagttcatccagagacatttctaatcaaagtctagaccagaggttctcaaactttgctgatcagaaacacctgggaagcttttacaaacgaattgatcactagaaataggggcccccagaatatacatttttgaaaagcttcccaggtgattgtgacaataggttcaggaacctaagatctagattctctatggaccactgttgcaggcaagtcactggttgaaaactgctagaataggtgttaatccaagagctgccctaaagtagtctaagattggttaccagataatggatgtggacagtgatcagagatgataggaggaaaggttggaaggacctgggaaagcttcacagaggactagagatttcactgggcctcagtggatggagaggcttctggacaggtactaccatgaactatttagacaaagtgagcaaaagaaggtagagacacatagactgatttccttggaaaattccatgacttttattagaaatgactctggatgctttgtgtaaatgtctctttggcaaaatttgcaactcagattggatttttccatctctccatcctatttggacatcagtcaatgtgagtccaggaaataaagattcatttgcgtgttagcttcactctggccaattagcttctgtaatttttatttccaaacaatttagttgatgatcttcccagaaactttccaggagcaccagagagttctgctgtcttctgtttggccatttccaagtccgcttatcctgattcctatcccaagtgctgttctctatgcagagtgagacaaaaatctgttcccataagaagcttaaggactattgtcctggttccccaatcttaaaacctgacttattggctcttgactccccagattcactcagtggccaaaccctagtgtttctacttttcactcaatcagcacatttcttggatgcttcctaagagtcaggtaccacaccagatgctttgaatgcattatttcattttatttccacagcaaccctgtgaggatggatagtgttcccattgtacagatggggaatcaagcttagagagatcagataacttgcataagataagaaagctaggcagggctggcacggtggctcactccagtaatcccaagcaccttgggaggctaaggcaggattatcgcttgagcccaagaggttgagaccagcctgggcaacatgatgaaactccatctctacaaataaatacaaaaattagccgggtgtgatggcaagtgcctatagtcccagccacccaggaggctgaggtgggagcatcacttgagctgggagggtgaggccacagtgagccactgcactccagcctgggagacagagcaagaccctgtctcaaaaaaaaaaaaaaaaagctaggcaccaaatgagctgggcctccaatgtggttctttcagactatctctcatggacatgacctcatttccagagtagattccaactttttagcttagcacttgagggactgctcctccccaaatctggtcacaactttctcttctcaccttgcgttgtttctcacacaagcttccttcttaccgtgcctttgcttgctctctcctgcttgaaagagcctttcccatcttcccctgctctctacttccaagctaaaggagcactgtttcttctcagaactcctgtggtcttttatctgcttttcttttatgacagttgaacttgcagctgcttcattgtcatgtgagtgacaggtgtcttgtggccccagcagtaggtcttccatttgcagacctcaacaacaagcgatggggaaaggtcagggtctcaggctaagcagagctcatcccccttcactctggctgaacaacccactgacatcaggagcttagcttctttttcaaaagaattgggtttgtttttaaatttgctaaaaagaaacaaaatgaagatgctatctgtagtagaaagaaaataatttcttatctttcaaagttaaatagaatgatgttaggattgttgagaccagacaagtggcagctgacaaccaggagactgtgtgttgttatcatcgttctgcttgtgactctgagcagctcacttaatctctccggaccttggtgtcttccctggtaaagcacgtgtatgtacgcggagaaggggaaaacgattgtggaggggattgacggaaatgctcccttaggtctcttcttacccagacatgctttgactggaactcctgaatccctcccagagcatcttaaaggaagcagaataatttaatcattaacatgtggaccccagactcagtgtgtatccatttagatgcttttggttacaaccaaaagaaatctaacttcagttggtttaaccaagaaagggaacttactgactcatgtaactagaaagtctaggagtgggtcaggtttcaggtatggtctaatctgtggattcttaatgtcttcacaaatgggcctctatttctctgtgattcttctggttttcccatccaccatgggtatcttcatcctcaaggtggcaaaagtggctgctgtggttcaaggccacttgacaggtgacatctgcacatcacactagtccaacacaggaaataacttttctcccctcaaccgtcataccaaagtcccgggttttacgcctattggaccaacctaatgccatacgcgcacttttcatccaaatactgaccggagaataagaaggactgattggctccggttaattaaggctcaactccggaggttaaggaggggtcagccccacccaaatcacaaggcaagggacactgggaagtttgacattctcatgttacaaccacattgtccatgatcgaattctggctctgctcgccatatgttattgggtaaattgcctttgtcaagcatctgtttcctcatctgtaaaatgagataataatacgtatctcagaggactgttgaaagaattaaataaaataatatgtgaaaagcactaaacatagttcctggcacagagtaagtatgatgatgatggtggtgttggagatgatgaaactgaagagggttaggggagcactggcaccagtttaggaagcagctgagccgtaggaatgttatctagtcaggagtgtgcatgcctgtcatgctgaaagcatctgtttgatctactgcccacatcatacttttccctacctctgctttttttcctcttaggattttttctataagtgctttcttcctcctcccctgcctctcaacttcctcatctttaaaggcccagcataagtgctaccccatattcagtagtttaaaagctgggtgtggtggctcttacctgtaatcccagctacttgggaggcctaggcaggtgtattgtttgagcccaggagtttgagaccagcctggacaacatagcaagaccctgtctctcaaaaaaatcaaacggttttaagaaaaagcttagttcagtaactttgcatctgtataactgaatctccccctgagcaggatcagtaatggttaagaacttagcttccggattaggcagagatgggtttgccactgggtaacttgggaaggttattcaacctctttatgccttagtttcctcatctgtaaaacagggtcttttgtttgtttgtttgttttttgagacagggtctcactctgtcacccaggctggagtgcagtggtgcaatctcggctcactgcaacctctgcctcccaggttcaagcgattctcttgcctcagcttcctgagtagctgggactataggtgcctgccactgcacccggctaatttttgtatttttagtagagacggggtttcgccatgttggccaggctggtcttgaactcctgacctcaggtgatctgcccgcctcgacctcccaaagtgcttggattacaggcgtgagccaccgtgcctggccaaaacaaggtcttaatagtacctacctcaggccaggcgcggtggctcacgcctgtaatcccagcactttgggaggccaaagtgggtagatcacgaggtcaggagatcaagaccatcctggccaacatggcgaaaccccgtctctactaaaaattaaacaaaaaattagctgggcatggtggcacgtgcctgtaatcccagctactcaggaggctgaggcaggagaatcgcttgaaccagggagtcggaggttgcagcgagcaagatcatgccactgcactccagcctagcaacagagcgagactccgtctcaaaaaaaaaagtacctacctcagagagtggttgagacaatgaaatgatgcaatgtgtatagtgtctataaagaggtcagtacagtgctaaccgtaaataatggatcttagtggttactattagcctcaggagagcaaggtctgtgtgacagtctctgcagcagtagctgctggataaacatacgttaatgggctgtaaggagtatggatggctctctttcgtcttccagccatctcctcaccctagcaaaataaaaaacaacccccaaccttggcaaaggcaatgtagcaaagtagtaggtgcaagatttaatgagcgacggcagggaggatgaggtgctaaggaggggtggacagggtaacagataacacatttcagcaacaggaagccgagaggaaaccagcaagcggctgctgttctgtgttcccccatccagccagcaagttcagctccggcaagtcatttgattcacccggtgatgaaatgggggtcaaccagtctgtgggctttccacctgtcacaggaccccacctcgtaggctgtggggatgtgatggagggtcagaatctccaggtaagtgtccccagctccctttcttctgtttgcactgcttctgccggcaccgtgacttactgatcacaagtctgatcctgtattcccacggtggggaaaatgaattagagcgggtctggatttggttatcaagcccccaggtctgtcttcctgagctttttcttcctctttccaaacattagaaacatcccaatagacagagataatgcgttcattttccacctaggaggaaaggggggactctagctttagaggcagctcgcagatcctctcacctttcttgagggcagatgcctgatcttggaagggttttaatcgtatcataatctgagtgtgtgagagaaagagccatgggcgtgtgcctttggccttggactccctgacctgggtagggggacagcttccttttctctctcctgccttgatctgttttcccctcctgctttgacttctggactggtcctctatcttatatatatgtatatatagtagagacgaggccttgctatgttgcccaggctgatgtctaactcctggcctcaagcgactctcctacctcggcttcccaaagtgctgggattacaggcatgagccactgtgcctggcttagttcctaggtctttctctgctagcccttggacttcctgtctcccttgagaggcacacacttcctagtaacccctcacctactcccatgtaaaatgagtgtgctgttgcttcccaggggctgtcctagagcagagtggcctggatgagctaccaaggccaccctgttcagcacgagaactaatctctaactcctggggctcctctaggcctaggttcagggccagatttaaatctttcattgtcccaagcactcaaatatttttggtgccccctcccacaatgtaattcaaaatacagttggctatttgaaataacgtaagctttacatatatgctaaaaatcaaattgcttctttccagatttctgaatgtgaaattcaggcatgctaattgaaacttcagtttccctgttttggtgccctgttttgctggtgccccaaacacctgctgagtgtggctgttgggaaatctagcctgggctccttgctctgagcagctgctctcttctttcctacaggggagcttctttcgactcttctacccctgccaaaaggcagaggagaccatggagcagcccctgtggattccccgctatgagtactgcactggcctggccgagtacctgcagtttaataagcgctgcgggggcttgctgttcaacctggcggtgggtaagggctggcctgacctctgcatgctttcccagttgcttggttatgttcctgggagatccccaggtggacgcagtaccttatagcctgcagtgtccaggcttttgtaaggggcatccattagccagtgtggtatggagagttgggagagaattacatatgaaagagctttggtgactgagttagactttcctggattcaaatccagactttataagttactagccatggggtttgggcaagttactgaacctgtctaaatacatgtctttgggggtttgtagtacgggatgtacgtaaagcctctaatgcggtgcttgggacatataatgtgttccataaatggcactgattgctcctttgtttagcatgtattaattcctactctgtgccagctattgtgtgtatcaaagaaagattcttaactgtcaaggagcgtacagtttcctgcagttttccctccagtcacccctcttctgagtagggtaacattgagtcatccacttcccccaaaggtcccacacctaggaattccacccagtgccttggcatctcagcagtttaccccgggttcagtactgccactttggacttagcttcccattttcttttcctttttttttttttttttttttttttttggtgagatggagtcttgctcttgttgcccaggctggagtgcaatggcacaatctcagctcactgcaaccttcgcctccagggtgcaagtgattctcctgcctcagcctcctgagtagctgggattataggagcccgccaccacgcccagctaatttttgtatttttagtagagacggggtttcacttggccaggctggtctcttgacctcgtgatccgccctccttggcctgccaaagtgctgggaatacaggcgtgagccactgcgcctggcttagcttcccattttctgttgtgttcactcttcctagggaagaaagggagaagaaataggtgattaactgccctgagctgctcaggggccgatggtggttctccagaggggagaaacacatgtccccacccatacctatactcaggctgcccttgggataacagctttggggcagccagatattctatagcccatgtctctgctaggatcttgtcgcctgcctgttagctggaatggcccctttaagacaaaggactctggataccccttgatcatcttctcccatggcctaggagccttcaggtaagagcttctttcccccagaccttgccatactccttgcctggtgacagctgctgagtcttagcttattctcaaagggcaaaaaaaagacatttccatctgctagctgtcttatctcccatctgcttcgtcccatagcattgggttcaccttccccagaaggcctttttcaagtccttttcaccttgtggagcctttcagcagcctttatatgctttacttctcatggtccagcatttatataaataaacacttttagctttcctcctatgtgatagcccagaaatgctagaaggagcatgagctttgtgatcagagcatcatttatttatctattttatttttatttttttcagacagggtctcattctgttgcccaggctggagtgcagtggtgtgatcacagctcactgcagcctcaacctcttgggctcaagcagtgctcctgcctcagccaccaagtagctggcacgtaccaccacgcctggctatttttaaattttttttttttttttcagggacgagatctcactgtgttgcccatgctgatcttgaattcctgagctcaagccatcctcccgttctagccttccaaaagtgctgagattataggcatgagccattgtgccccaccaagagtcatttatttaacatgagggttcactctgtgtgtggcattggcgtagtagcgaataagagacttgctccctgcacttgtggagccagcagcctcggcctcccaaagtgctgggattacaggcgtgagccactgcgcccggccccatgtgttcttatttaagcttgtgaatgttctctctgtctgttcatcaacatatatgtctagtttaggtcccagaatgttgcacatctcaaaggcatctgtttttgcctctcagcccccaaaccattgtccacattgtagccatggagatctttttattttattttattttattttattttattttattttattttattttattttattttttctgagacagagtctcgatcagtcgcccaggctggagtgcagtggcgtgatctcggctcactgcaacctttgccttccgggttcaagcgattcttctgcctcagcctccaagtagctgggattacaggcacccaacaccatgtccagctaatttttgtagagacagggcttcaccatgttagccagcctggtcttaaactcttgacctcaggcaatccacctgcctcagcctcccaaagtgctaggattacaggcatgagccaccgcgcctgtcagggagatctattttaaaacgaaatatgatcttgtcattccagcactcaaagcagtgcccagcatataataggtactcaataaatatttgttgagtgaatgaatgaatgttttttcccacttaaaaatttttggccgagcgcggtggctcacgcctgtaatcccagcattttgggaggccgaggtgggtggatcacctgaggttgggagttcgagactagcctgaccaacatggagaaaccctgtctctactaaaaatacaagaaattagccaggtgtggtggtgcatgcctgtaatcccagctacttgggaggctgaggtaggagaattgcttgaacctgggaggtggaggttgcagtgagccaagattgtgccattgcactccagccttggcaacaagaacaaaactgcatctcagaaaaaaaaaatttaatagctctttgaacctaattcagttcttttcatggtcttacctcaatgcaggtccaagacaaagtttctaggcctgttccttgctatttgccccagtgtagctctccagacaaaatggccttctttcacttactgaaaggcactgggttatttcctccctcgctgtcttcatctgtgctatgctttgtggctgatctttttgcctggactattcaccgttctgctcttctcttcctcttgcccctctccgtcttttcctgctaattccagattacctttaagatcttagtttggatgtcattgtcctagggacacccatcttgacacctatattatattaggttaatttttccagaatgtgctttcataagacaatctatacttctcagcatttaacataattgtaatgaattaattacttgtgtaattattctttaatgcctgtcttcttcactagattgtaagccttctgaaggcagagaccacatctgtcttctattgctctggcttctaggacagtgcctggaaagtagttgtttagccataagtatttattgaatgaatacaagggctgtgctgtgctaggttctcattcattcagcagacatctgtggagcacctgctctgtgccagccccttggcatgagaggaaggtgggacataccaagattaacaaatcgaggaaatcgcatctgctagaggagcaggaacatagactcctgtaactgtagcccatggcaggaagtggagagtaaatatggagatgaagttagaaaggcaagtaggtggtttttgatgctgctttcttgttcaataaattgagtacctgctgtgtgccggggctgggcattcagtagtgaagacgagagaattcctaccttcaggaagattatagtctagcagggaaaagaagcaaagaaaccttttcctcctaggccaacaggtatttatggagagagtaggtgagcactttgaggtggtccttttggtctaagaatctgtattgagacttcacacttcattagacctgggcgaggcagttaaaaatactctcattaaccagagtgaaattccaagggaaaaggaagggaggataaggaacattgtttcctctcattgcatctgtggttaattcaggctctgaaatccttcccatgggtcatggacctatggtttcctatcctaagttggaatatgtgcagttaaatacctaaccattctcagtgtgccattgtctcatttgattcccacatagccctctgaggtgcacaggcaggaatgcctatttttcagctgggcaaacaggctctggaaggcagacttgcccaaggtgacacagtttgaactgggaagggatcagaaatctctctggctggctgggtgcggtggctcatgcctgtaatcccagcactttgggaggccgaggtgggcggatcacgaggtcaggagtttgagaccagcctgaccaacatggtaaaaccccacctctactaaaaatacaaaaaaaaattagccgggcatggtggtgcacgcctgtaatcccagctactcaggaggctgaggcaggagaatcacttgaccccgggaggcagaggttgcagtgagccgaggccaagatagtcccattgtactccagcctgggcaacagagcgagactctgtctcaaaaaaaaaaaaaaaaaaaaagaaatctctctggctctgaagtccagttcactgccttccctagaaaagtgggagaaggtgaaaaggaacttaagaacctgatctccctgtatcaattggaaattgggcaagttgtatttaacagaaaactcccaaataatagtgacttaaatatggtaatgtttatttctctctcaagtgaaaggaagccagaggtagacagttaaggttgatgtggtaattccacaagatggctgctagcagagcattgttggaatgagggtgaaggctgggctgttcttttgatcccttttccttgttcctttttgaatctccaggactttgtattcagccttctgcatggagctggcctcacgtggctttgtggttgctgtgccagagcacaggtgagggatgagccgccatggattgggtgcctgcagtgagctaggatataggctagtcccctatcaatgtactatttctaaccctctcgacaaccgtgcaagccagcattataccacttttaaaggagagaaaaccaaggtttaaagatgttaaataatttcccaaaagtgacatagctgagttggaattcaaacccaggtctgtctctaaaatctgtattttttccacttccctatgcatgccccagatctccttccctactagccaaagggtgatctagagcctcctggatgaaagggaggctttggtaaaggggaaaaataaactcaagaatgttttctggtttctctctgatgatgtgtgtatttcagggaccggtcagcggcaaccacctatttctgcaagcaggccccagaagagaaccagcccaccaatgaatcgctgcaggaggaatggatccctttccgtcgagttgaggaaggggagaaggaatttcatgttcggaatccccaggtaagtttgtgccagttggggagggagagttaatgagcctgttctctccctactatatttgatagcaagacttttagttaaccctctcttgaaatgtcagtcatagtgggtctgagtttgccacatcagtggaaatacataggatattaatcaggactcttgcaattgctgtgacagaaccccaacttaggcttacctaggcaaaaaagggaatgatgggctcatataagtagactgtaggaagagaaggacaattggaaccagacttaaatgccgtcaggatttgttcttcatcctcatttctgtctctctcttggttggtgggtctcatcttcaaactggcctactttccaaggttagaaccataagttgtttttttttttgtttttgagacaggatcttgctctgtcgcccagattggagtgcagtggcatgatcatggctcactgcagtctcaatcttctgggctcaagagatcttcctacctcagtgtcctgagtagctgggactacacacatgcaccactatgcgcagctaatttttttttatttttatttttttgggacagagtctcactctgtcacccaggctagagtgcagtggcaccaacacggctcaatggcaacctcaatctcctaggctcgagtgaccctcctacctcagcctcctgagtagctgggactacaggcacacaccaccacacaattttgtttttttagtagagacggggtcttgctatgttgcccaggctggtctcaaactcctgaactcaagcgatcctcccactgtggccttccaaagtgctggagatataggtgtgagccacggcacccagtcagaaccacagctcttgacagctctgaccttgtgtgtgttcagccttgtcacctatgagaataggactgtgtttgagttgctccctcagtcccttaccctggtgccaaactgcagtttgaaaaatcctggagagggattccaggcctggggagaagtaacaaaatgggaagttcccaccagaaatacattgttagaatgggagtgggaaggccatcctcaaaagccagggttaacaagagaaggaaagggggtaagtgcttgggagacaaaaacaatagatgtctgatgtaaatgggcagtggaatccagtactggtttgctaataacagcactcttaattccttttgtttttaaaatgctttcatgtacatcatctcattggatccttctgacagccctgtggttatgtagttagagtcagaacaacagggctgagtctgttctaatgttaggcagtgcttatgtgagctgcaaggtagctgagccttctcaggacatggcacccaaggtgcttgctgaggcgtgggtgggtagactatctgtgcattcttccttggctctgtacgtgagggagattctcgctggacagttgtggagtgttccagtcccactgggactgtctctgttgcaggtgcatcagcgggtaagcgagtgtttacgggtgttgaagatcctgcaagaggtcactgctgggcagactgtcttcaacatcttgcctggtggcttggatctgatgactttgaaggtatggaagcaattggtatgacctagagcccagtattcagggttttctcggttacaagtaacagaaacctaactaactggtatgaaccaaaagagaattgattggctcatataactatcaagaagatcaaaggccaactttaggccagtgtagttagacccagggtctcagacattgtcatcaaagccctggcactcttctctcccctctcctggcttggtttctctgtatatctgtggttttctcaccagactctctcctttaggcaagaaaggtggtcgctagcagttcaagcctgcacaccaacttacagctccagtttttttgcttttttttttttttggagacaaagtctcgctcttgtccccaggctagagtgcaatggcacaatcttggcttactgcaacctccgcctcccgggttcaagcgattctcctgcctcagcctcctgagtttctgggattataggcgcctgccactgtgcctggctaatttttgtatttttactagagacggggtttcaccatgttggccaggctggtctcgaactcctgatctcaagtgatccgcccgcctcggcctccctaagtgctgggattacaggcgtgaaccaccacgccaggcatcagctccaggtttaaaaagaaaagagactgtcttagcttccactaatctgggaaagctgtgaccctacgtgggtctcatgcccctctgggccagtccctttgtcagagggagagggtattccgattggcctgcctaggttacattctcacttctgggtcaggtgattgaccacccacaggaccagatggatggcggggagaagattcaggctactgagcagcaaacaacctgtgtccactgcaggctcagtccttcctttgagggaatcccaagaaccctcccgggagggtataaaaccatcctggccatggaatttggtgcttatgaagatacattcttcataccccacccccacccaatctttttttctccataatttcaaaagtcattccggctgtattcagagaaccaagaaatttcacaaaagcatgaagaaaaatgaaaaacctttttcaatattttgatatttgtccttccagttatttttacatgtattaatatgtgtatattttttttacacaattatgttatcatttaatacaagctgttttgtggccttattttcatttagcaagacagtatgagtatcttcttatgccaattaatatttttgtatggcatgatttaaaaaaaatttttttagagacagggtcttgctatctgcccaggctggactcaaactcttaggctcaagcaatcctcctgtatagcttgacctttattatttgtttttatttatttatttttttgagacagggcctcactctgtcacccaggctgaggtacagtgatgtgatcaccactcactgtagctacctcagcctcccaagtagctgggactccaggtgtgcgccaccatgcccagctaattttttgtattttgtagagatggggtttcaccatgtttcccaggctgatctcaaactcttgggcccaggcagtccacctgccttggcctcacaaagtgttgggattacaggtgtgagccactgcacccaactgcatgatttttaatagccatatcatattgtattgtatgaataagaatggtgtgtgtatgtgcatatgtgtatatatatgaatatataaataaatatatataaaatatatatatatatatatataaatatggcccagtgcggtggctcacgcctgtaaccccagcattttgggaggctgaggtgggtggatcacaaggtcaagagattgagaccatcctggccaacatggcgaaaccccgtctctactaaaaatacaaaaattagctgggcatatagtcctggctacttgggaggctgaggcaggagaatcacttgaacccaagaggcggaggttgcagtgagccaagatcgcgccattgtactccagcctggtgacagggcgagactccgtctcaaaaaaaaaaaacttatatatttacgattactgctttatgagacttgctatttcaagagctcctcccacaaacttatgcagtaagcattcatacctctttacatagaaagaaactaaggatcaaaaaggctaagtacccaagattacccagctaagtaagtggtagagtcaaacatgaaattggggctttttgattctacagcctaagctgtgtgccccaaaccttcttcagaacatatattttaaaggctttggtaatatcctccagggagaagcagtctgcctgcatgcccagtaggtaaggcagaccctggaatctagagtgctttaccaactacagtgtttgtatcatcaacccccacgagacttggaggtgccctgggcactgaggtccaggcctgaatgcctgagaaaggcactgggaaaccaggctcatgcctgtaatcccaacagtttgggaggctgagtcgggtggatcacttgagcccaggagttcgataccagcctggccaacgtggcgaaaccccatttctactaaaaatacaaaattcaggccaggcgtggtggctcacgcctgtaatcccagcactttgggaggctgaggcgggcggaccaccttaggtcaggagttcgagaccagcctggccagcatggtgaaatcccgtctctactaaaaatacaaaaaaattagctgggcatggtggcagacacctgtgatcccagctacttgggaggctgaggcaggagaatcgcttgtacccgggaggcagagattgtagtgagccgagaccacaccattgcactccagtctgggcaacaagagcaaaactccatctcaaaaaaaatacaaaatttagctgggcgtggtgacatgtgcctatagttccaggtactcgggatgctgaagcacgagaattgcttgaccttgagcctaggaggtggaggttgcagtgagccaagattgtgccactgcactccagcctcggtgacaaagcaagactatctcaaaaaaaaaaaaaaaaggcattggtaaatggcaggctacagtccagttagattagttaagagggcagccttttaggggaaaatacagcatattaaaaaagctaagtacattttcatctatcaaattgagtaagatccaaaaattgattactcactctgttaacaaagttgtggggaagtagatattctcctacattgctggtgagaatacaaattgtcccatggaggacatgtggcaattgatatcatcaacagtacaaatgcatatgtttctttgacccagtaatttccagtttggggaatttatcctacaaataaatacctgcacacatgcagcatgatagatggacagtgttattcattccagcgttgtttgttatggcaaaagtttgatagtaacctaaacattcaccagtgagggaactggtttaattatgggacagtggatgtatttgcttggttaatgctaattgctagagtgtgtaaacgccacatttcagtggcttaacacagtataaatgtatttctctcctacataaagttcaatatgggtgctcctgtgtaagaggcaactcagggatccctgctccttttataatctcatatggctctaccctctcacaaaatttgtgaatcccaaatttgttgtttgcattaagccaacagaatgggaaagggcatagagatttgtatgagacaatttatggaccaggtctggaagtagagatatcacttttgctcacattctgttggctagaacaatcacaagtccttatctaactgctgggaaacagtttagctgtgagaccaggaagaagaggaaaagatttggtgatcggctagctgtctgtaccatggccaagtcactgtgaaaaaggatgtggaaacactttatatactaatgtggttatgtacaaaaatatacagcgccaggtgtatgaaaagagggaaagtgtatatattcatgttgacttatgaatataagcaatctccttaggggcacataagaaactgttacctgtttggaggtaggtggcgggcaactatatagaaaaagacaggggtaggtaggagatttctttgtatacctctgattttagaggtatatgaatatattaacctatttttttttaatgttgaagaggccatccaaccaagatgctgatccgagggtactgagtgaagggggaggatttaggtacaaagccttggaatagacactggggagagcagagcaaaagttcagagcagaggctgggctgtagagcctggagaggcctccagagccccttagcaagcagctgcagtggctttttatataaccataccctgaaggcttctggggacgactagaaatagatacgtgtgaagcatgttagagtgcacagactcactcttccccttggctttggataaaaatcacgacatatatccaaagaggaagtagaacctgcactggcagtctttgctccagagtacaatggatgggcagcaaggagcatccccgtttcaccctcagctcagtccatgtgtcatggaccctcggaccagtttataaggcagagattctagaggatggaggtggcccttattcttaacatgctcataaactgatgggtcagtgtggaatctgaccatttcgagccattcatttcttcatagattttttttttttttttttttggagacagggtctcactctcacccaggctggaatgcagtggtgcaatcatggctcactgcagcctcaacctcctgagctcaagcgatcctctcacctcagcctcctgagtagctgggaccatacttgcacgccaccatgcccagctaatttttgtacttttttgtaaagagaaggttttgctgtgtttgagccctggctggtctcaaactcctaagctcaagcaatccgcccgccttggcttcccagagtgttgggattacaggtgtgagccaccacacccggcctattcatagatatttgaatgtctgccctggtccactattgttaggtggtgagattacaaaagtaaacatgagccgggcgcggtggctcacgcctgtaatcccagcactttgggaggccgaggcgggcggatcacgaggtcaggagatcgagaccccgtctctactaaaaatacaaaaaattagccgggcgtggtagcgggcgcctgtagtcccagctactcgggaggctgaggcaggagaatggcgtgaacccgggaggcggagcttgcagtgagccgagatcgcgccactgcactccagcctgggcgacagagcgagactccgtctcaaaaaaaaaaaaaaaaaaaaaaaaaagtaaacatgaaaagtgtgattctcacaattcctgcctacacaaggctgttcagtctaaggattgcttgactgttgccccttccataggtaagagattcttgacagtgtggtgttggtggactcacttgctgtattgtgcctttggcctcattgcctcactatttcttcctcttgctcctgatgaattcctaaagaagcagtcctgagtttctgacttggctaagttctccactttcctcagggcaacattgacatgagccgtgtggctgtgatgggacattcatttggaggggccacagctattctggctttggccaaggagacccaatttcggtgagtttcctagtagtgttgctgtgcttagctccatacaccgtttattcatttagaaagtatttgttacacaagtactatattcttggcactgtttagggactgaggattcagcggttaaacaagaaaacaagatctctgatttcatgggattatattattgtgggaggagacagactagtgaaaaagccaaccgataataaaatccccatgaccaagtgcaatgaagaaaaataaagctgagcatgttggcttactcctgtaaccccagcgatttgggaggctgaggcaggaggattgcttgaagccaggagtttgagatcagcctaggaaacatcacaagaccccatctctacaaaaaattgaaaaaaacaaaacagccaagtgtgatagtgcatgcctgtagtcccggctactttgaagcctgaggcaggaggatcacttgagcccaggagttccaggttacagtgagctctgaccgcaccacttcagcctgggcaatagagcaagatcctgtctcaaaaaaaacagaaaaaagaaaacaggctgatatgtctctgagaaagtgaaatcaagactgggaaggcaaagaagccagtcgtgtgaagatctagaggaagatctttccagccagcaggaatagctaatgcaaaggccctgcagtggaaagaagcttgctgtgttagggtgggaggagcgtagtgagtgagggggaggcaatttaagctgtgatcagagagagaagcaggggccagatcacagggtcatctggccagggtaaggaggtgtatattttattctacgtatgatgggaaactgttgaagattttcaacagagaaatatcagtcttacattttaaaagatccttctggctactatgtgaagaatggattgtagcaggacaagactgaaagcctagaggctcattagagagattctgtttcagagtcaatgtgaaagatgataaatttacatcaggattgagatagtgggatggagagaagtgattggagtcaggatatgtcttagagttttcaggatttggtcatgtgggaggtgaaggaaagagaggaaatccaggtttttcttcttatttttttccctctgagacagggtcttgctctgttgccctatgctggagtgcagtggtacaatcagctcactgcagcctcaacctcctgggctcaagtgatgcctcaacctctcaaatagctgggactacaggtacatgctaccatgccctgctaattttttaatttttttttttaagagatggtgtcttgctatgttgcccaggctggtcttgaactcttgggctcaagtgatcctcctgcctcagcctcccaaagtgctgggattacagggatgaaccaccatgcccagcccaaggtttttcatttgtgtatctattatttgagtggaagatgattgtcctttattgagatggagaagaatagaggagcatttcaggggtctgaggaaggaaatggcaaaatcttaaggcccataatattgctcttggtgacatggttttgctgttggcaccaaggaggcttttcctgacctcacatagaaccttgtgcaatcagggcactaagttatattgttttgccactttgtctattctgtcttccctgctggactgggagctccttgaaagcaggaacactcatttatgtctatatccaaagcacatagtagacactcaatgaatgttgaatgaatgaataattaaatgaatgaagtgccattctgtggaactcaggtcagtcacctgagagtagatccaggagaagagggatatctgatccttgttctcagagagtttgaaatctagaaggatctttggtgaaaagtaaaagtgatccctacctaagatcctgactgaaggccgtgggccctggtacccccctcctggctttctgagcctttaccccaccagagggaggaactccgcccttccctccaccaccctaactattcttgcctgggatccgcatggcaattccaaatgtctggtcctattccaggtgtgcggtggctctggatgcttggatgtttcctctggaacgtgacttttaccccaaggcccgaggacctgtgttctttatcaatactgagaaattccagacaatggagagtgtcaatttgatgaagaagatatgtgcccagcatgaacagtctaggatcataaccgttctgtgagtaaaccacaaggtcgtgatcccagggccctctccatttgccacttgctgtggtgcccttaacttctggattacccaaaactttctacccattagtaggatacctgaatacttcctgaattgcaaagtctaaattcttttagaattttctgtctgtccttcttctccactgagctccatctacagtgatttattccatagtttatctgactttatgacaggatttacctagtactttctgaaaaagggcattatggggttgggtgttggaaaggaagtggtgtgggtttggatgagttccagagattgctagcctcatttgggaattttattgggtctttggaagagtgtgaatatggtagacctttgatattcaccagacacatttctagagaccttcatgaataccagaatcacagatcactgttaacatatgttgtcttccataaaccttctatattctggtcaagagaagccacattttttcacttccatcatcagcactatcagttagttttcttttgggagccatttttcacagggaaaaaaacatttttagtgactttaagaaatgttccacatgtgggaggtgatattgagccacagatgtcgggctgagatctcacggactgctcctgccctgcagttgagcccagcggcacacaggatccagggatccatctggttcctatttcagcagaatgacaagtgactgcataccatggacctttggagtcactgggtagttgaagtgccaaatccagagccctcgagcactggggccggcagtatggccagtggcttcttcccttgctcatcttggtcctggccctctttcctagggccacccctcctcgttcagttaggtttcatggcagtagacactgcctgaatgcttccccaggtcagattcaggagggaaaggaggtgaggccagttgggaaggggtacactcaggggacttaacgcctggcaatgtatcgtttattcaactgagtgctggatactcaagtatcccatatattattctatacacctttttgtgtgccttaactaatgcattttttaaagtcagtttttctgtgatatcagacaaatactttagcatttagattctctttctctcactgaattgactagtaaattcagttatgaataatttagcccaaaattaacctagcaaggatttcacctgcaaattaaatttattttctgccaaaggacttaagttccaacccagaaacccccttttacaaagcactcactcttacttttctgattgtttaaataaaggcaagtaattccttttccctcttcactctgtggtacagttctgaagaataacttcatttgttttgtgaatgtttgaaattcaccaggcaaaagccacagctaatagattgtagtaacatagaaatgccacgtgccacagatcccacctccttgctcctgtccctgctcctgctagctcaaccttttccctgcactgccaggcattgtagtctacgggtcaagccagctttgaagccaagcacatctggcttcaaatcctaactccatccccaactacttgtatgacctgaccctaagcagatagtttctctccttggattctgtcaagggggaaaatacttcccttacaaggttgctgtgaaaataaagtgtgataatacatgaaaagcaccttgcacatagtaggtgcctaacacacatctgtatgccctagccgccagacccctgccagttgtttttcttttcccctagtggttctgttcatcggagtcaaactgactttgcttttgtgactggcaacttgattggtaaattcttctccactgaaacccgtgggagcctggacccctatgaagggcaggaggttatggtacgggccatgttggccttcctgcagaagcacctcggtaaggagaaaactggggctcttggggcagctgtggggtcccttagatttccttgcagcagagtgagaactctgacatgtctgggatctgggaaggagatttatggcaaatggaaaacctgagtgaaggagagacttacatagaattacagaaaaaacaagtccaggtgcagtggctcacgcctgtaatcctagcactttggtgggttgaggtgggaggatggcttggggccaggagttcgagaccagtctgagcaacatagtgagactctatctttaccaaaaaaaaaaaaaaattagctgggtgtggtggcacacacctatagtcccagctactcgagaggctacggtgggaggatcagttaagcctaggaggtctaggctgcagtgagccatgattgcaccactgaactccagtctgagcaacagagcaagaccttgtttctaaataaataattaaacaaataaataagaaaaaatacttaactgaaagtttggagatcctgactatcttacttgcagaatgacctggcctagtcatttaacctctctgaaccttggtttcctccctgtaaatggagtattcacctctctctactccaccacctctctccttacccagactcattattgcccaccttatctgcattgtaggggagtttatgaggataacgggctaaatttatggaagtgttttaaagaaacaaagcatggaaggactatgaataatgtcatcagtcatagagcagctaaagggcgaggcctgcagaggtccatggtccagcttccacccagaggaggcatcctcttattaagctttattggttacaaagactagaggttcacaaacttagcttgagaaaaaaaggggagtttgtttatgagagtgcacctggactgggtgggagtgcagttatagaaatcagggtggctggcaggactgacttttctttccgtctgtctcatgggttcagtctctctgtgtcttcctctcacgacatctctttttctttgttccgttatgcatttttttttctgctctgtggtttttctctcactgatagcagctgtttattccatttctgcttcctcataacttcactcggcttgaaccactcagagtgtgttccctttagcttgcggcatcctttcatcttcagctcccactgctcactgccatatttttttggatttctttgaacagatttccaagagaggcaatttgattgtatcagctcctctttgcccaccagaacacactgtagccccgtcccagctaggctctgagctctctgcatcagaggtccctttctgatccctcagcaggtgctgtgtgcagggcagtttccatgagaaaggagccaggcttgtctgaatttcaaaggtttgacttaactctaacctaagagcaagatctcctagtttgtaaccctcctctacttgcccaggttaacccctcaagagctacccatagaagcctcagacggcacctggcagttccctagatatttgaagtcacctatgctagtcttctctgagtgttctgtttattaaactaaatgttcgtggtacctccacctgtcccggttcaattccccatgttgctatttgttatccccttcctttggagtcgctgttttttggtgccccttctaaagtgtagtgccctggccgggtgtggtagctcaacatctgtaatcccagctactttgggaggctgagatgggaggattgcttgaggccacgggtttgagaccagcctgtgcaacatagtgagaccccatctcagcaaaaaaataaataaaattagccaggtatggtggcatgtgcctatagtcccagctactcgggaggctggggtggaaggatcacttgagcctgggaggtcaagactgcagtgagccaagatcatgccattgcactccagcctgggcaacagagtgataccgtctccaaaaaataaaataaatagataaactgtggtgccctgacttgactataatgtattagatgtggtctgaccggtgccatcctggacagtctcttctgtgctctgttttttgttttgttttgttttgtttgagacggagtctcactctgtctctcaggctggagtgcagtggtgtgatctcagctcactgcaacctcaacctcctgggttcaagcgattctccggcagttctcctgccacagcctcccaagtagctgggactacaggcatgtgccaccacacccagctactttttgtatttttagtagagacagggtttcaccatgttggcctggctggtctcgaactcctaacctccagtgatccacctgcctcggcctcccaaagtgctgggattacaggtgtgagccatcgcgcctggccgtctctgtgctctggacactagccttttagttggatgacctgagtgcattcacattcctcacaagtgcacaacaaacagcctggattgagtttgcatttaaaacacatctgtcttacgcatttattgactttttggaagtaaattttcatttttatatttctgcctgttcgtttcatcttacacatcgtgagccttgattccagcctgtgtttggagaccttagggtcaataagagattttagggcatcattcttatcacctggcaagcagggaatggacccatgtctcaagactttaatggcgcctgactgcctggtcctcagcccccttcccctgtcccctcataggcaccatgtcattataaaagcttaagatgaaagatgatgggaagcccaccatggcacgattgggctccctttaaaagcaatacccgttgagctaagatactcactgttagaaacctgctagcagacatggaaatgggaggtaggaggcacttagactgaaagaagatttttgaggacttactttatgccaggccttctgctcctgctttatcgcgtgtaattctagagacagccctttccagtagatacctttattattaactgcattttacaggggaggataccaaagcgtaggaaatttaagtaatttctttaaggttatctggttatcaagtggcaaagccaatatgtaacctagactggccaattccaaggcccatgcccttagtcacttcactatgctggcggtgactctggtgacaattcagagtgataagttccatggccacagtaggcactcagtctttagactgtccacacggaggacagtctcctaactttgacaggagaggaagaacagctaggaaagggggcttccttgacaacacaatgtttgcctttaatcttagtggagggttcacaggcaggaaagggcgagggtcttctggacagaaggcataaatgcttgagtgggcctggtcaggattgggaaactgtgtttagtgtatctggagctcaggagagtgaattgttgaaaggcaaagatagagaagtgggcagaagccagaggaagaagcctatggatttgctgaagtgagtttgaatgttattccacaggctgtcaggagcccctggtgagttctaagcaggtgaatgttgtgattagacttgtgttcacagtctggtgcattgtggaggatggggcaaggtgagaggcagggagctcttaggtaggaggcttttgcagtaatccgagtgataagagataagacagtctgaaaaagttgggcacagtggctcacgtctataatcccagcattttaggaggctgaggcaggaggattgcttgagcctaggaggttgaagctgcagtgagctgtgattgtgccactgcactccaccctgggtaacacagtgagaccctgtctcaaaagaaaagaaaaaggccaaggctgtgggcttgggcaaattagctttacaaagagagaaaagcttttagtaggcacacagtacattgtcacatgggaaactaaaataggctgtaagtggctcagctgaacctctcactctgaaaaaaattccttctgagagcacttgtttggctgttctggggatatgatcttctatgaagactggtgcttccttcatattaactccatgcagctcctgtctccacctactctcctctcccactctcctggaagactatttcacaccttttttctcctcgaacctctcacacctcttcccttatcctgtctctcagttaactttgcctcccacttcaccaagaaaatggaagcaaccagcacttcctcagactcccaacaccacctctccccaccttcctgtgtataatcagctttcctttcggttactagagttcccacctcagttgcctcattaaggccaaccccccaacacaagattccatcctcttctgtctgctcaacatgattgcgccagtgatttttccctctttattttatttatttatttatttatttatttaggacagagtctcactctgtcacccaggctggaaggcagtagctgccatctcagctcactgcaacctctgctcccaggttcaagcaattctcctgcctcagcctcccgagtagctgggattacaggcacccaccaccatgcccagctaatttttgcatttttagtagagatggagttttgccatgttggccaggctggactcaaactcttgacctcaagtcatccgcccacctcggccacccaaagtgctgggattacaggcgtgagctaccatgcccagcccctctttactttagatcatcaatttttccctctctgctggttcatttcatgctgaagtttctcctagaaaaaaataactttctcttgacctcaatatcccctgcagttgccacccatctccctgttccccatcacagcaaaactcaaaagaatgtctgctttcgctttttctaattcctctcttcccattccctcttaacccactccaggcttttgcatcacagtactccatcaaaaccgctattgtcagggtgcccagtgaccttcacaatgctagctccagtagttctcattccccaacttctggaactctctgcagcttctgataaagttgatggccccctcctctgggaaacccccatcttcacttcagagatccacactgtggacttccccctatctccatgtttgggcctcttccatctgctgtgctgcttgcggggcccagtgcctggacctcttctaatggctttccgtgccaactccatgctggggactccctctgccactgctccccaactctacttagtcatctaatagaagtaacaaacaaaaccaatttcaactgcactcttttccttcttcgttaatcgtagctccatccttctagttactcaggtcaaagtcttcatccttgtctcttctctcatgcctcctacccagtccctcaaacaatcctattggctctaccttcaaaatacacatggaattgaatcacttgtcaccaccccacagctaccatcctgtccaaatcatctctcatccaaattagtgcagtggtttcctaactggtctcctcactaccacccttgccagtccctctcttcacagtctttttttttttttttttttgagaaggcgtctcactctgtcgcccagactggagtgcagtggcgcgatctcggctcactgcaagctccgcctcccaggttcacgccattctcctgcctcagcctcccgagtagctgggactacaggcgcccaccaccaggcccgactaatttttttgtatttttagtagagatggagtttcgccatgttagccaggatggtcttgatctcctgaccttgtgatctgcctgtgttggcctcccaaagtgctgggtttatttgtatagatgtagggggtacaagtgcaattttcttacacagctatattgcacgtggtaaagtctgggcttttagtgtacccatcacccgaatagtgaacattgtatccagtaggtaatttttcagccctcacccctctcctacctgcccaccttttggagtctccagtgtcttatttttctactctgtatgtccatgtgtacccatcatttagctcccacttataagtgacagcattcggtacagcattcggtatttgactttctgtttctgagttatttcacctgggataatggcctgcggttctgcaaaacgtgatttcgttctttttttataactgagtagtatcccatggtatatctgtacaccacattttctttatcagatcttctgttgatgggcacttagggtgattccatatctttgctattgtggctagtgctgtgataaacatatgtgtgcaggtgtctttctggtgtaatgatttctttccctttgggtagatagccagtagtgggattgctggatcaaatggtagttctatttttagttctctgagggatctccataccgttttccatggaagttgtactaatttacattcctaccaacggtgcataagtgttccctttctctgcatcctcaccagcatttattgtttctggactttttaataatggccattctgactggtgtagtatctcattgtggttttaatttgcatttctctgacggttagtgatgttgaacttttttttttaaatatgtttgtgggacacttgtatgtcttcttttgaaaaaaatgtctattcatgtcctttgtccacttttttctttttttgagtccagtttctgcagaatgcctactttttaatgggattatgtgtttttttttttcttgttgagttgtttgagttccttgtagattctttttttttttttttttttttttttttgagacaaagtcttgctctgtcacccaggctggagtgcagtggtgtgatctcggcttactgtgacctctgccccccaggttcaagtgattctcctacctcagcctcctgagtagctgggattacaggtgcccgccaccatgcctggctgattttttcgtatttttaatagagacagggtttcaccatgttagccagactggtctcaaactcctgacctcaagtgatccaccagccttggcctcccaaagtgctggcgttacaggcgtgagccaccatgcccagcctttccttatagattctggatattagccctttgttggatatatagttcagaaatattttcttccattctgtaggttgtctatttactctgttgattgtttcttttgtggtacataagctttttagtttaattcagtctcatttgtctgtttttggttttgttgcatttgcttttaaggacgaattctttgcgtgagccaatgtccagaagagtttttcttctaggatttttatagtttcaagtcttatgtttaagtctttaatccatcttgagttaatttttatatatgctgagagatatgggtcctgtttcattcttcttcatatggctatccaatttttccagcaccatttgttgaatagggtatcttttccccatgtatatatttttgttgactttgacaaagatcagttggttgtaggtatgggggctttatttctgggttctctattctgtttcatttatctatttttctgtgtttatacaagtaacatgctcttttggttactataaccttgtagtataatttgaagttgggtcatgtgatgcctccagctttgttctttttgcttaaggttgctttgacaggctcttttttggttccatatgaatttgaggactttttttctaattctgtaaaaaatggcgttggtagtttaataggaattgcgttgaatctgtaaattgctttgagcattatggtcatttttaacaacattgattcttccattccatgagtgtgggatgttttttccatttgtttgtgtcatctacaatttctttcatcagtattttgtagctctctttgtagagatctttcacctccttggttaaatgtattcctaggttttgttttgttttgttcttgtttttgtttttgttttggtggccattacaaatgggattgagtttatgattgggttctcagcttgattgttattggtgtatagaaatgctactgatatttttgtttgtttcttcatttgttttttatagagacagtgtctcactttattgcctgggctggtctcaaactcctgggctcaggcgatcctcctgcctcagcctcccaaagtgctggtgttataggcatgagccagtgcacccagaaaaatcaccaccactgatttttgtacaccaactttgtatcctgaaactttactgaagagtcattttatttatttatttattattttggcttcctcaatcatggtattattatttatttctctttaaaaatatggaaagcttaacgaatttgcatgtcatccttgtgcaagcgccgtgctcatctctgtattgttccagttttagtatatgtgctgccaaagcgagcactgaagagtcttttcttcatagagcagccagagtgatccttttaggaatttagtgagatcttctcactcttctgctccgaattctccagtggctcccagtctccctaagagccaaagccagactcgattatcctgccaggtatatgtcatgtggccctccagtccctcctggcctcctcccctgctgttcttcccttggctcacttcactctcaccacatgagcctcgaacgcgccaggcacgctgcagccttagggcctttgcactgctcctccctctgtctagaacattcctctcagatagtctcgtggcacactcccacttccttcaagcctggcctcaaatctcaccttctcagtgaggcccaccctgaccaccctttttaaaacattggcctggccaggcaccgtggctcacgcctgtaatcccaacactttgggaggccgaggcgggcggatcacaaggtcaagagatcgagaccgtcctggccgacatggtgaaacctcgtctctactaaaaatacaaaattagctgggtgtggtggtgcatgcctgtagtcccagctacttaggaggctgaggcaggagaatcacttgaacctgggaggcagaggttgcgttgagccgagattgaccactgcactccagcctggtgacagagcaagactccatctcaaagaaaaaacaaacaaacaaaaaacattgggtccttcctttctcccttcactccaacccctggccaccaccagtgcttcccttaacgggctctattttttttccatggcacctctccccttttcacatcctatatagttattatgtttattgtttgtctctgccactagatgatgagctctgtgaggacagcagtttccatctgttttgtttgtggatatatttttagctcaaagaacagagtgtggcacatagtggatgtgcttattgttttttgaattaatgactatgtagtacttatacattgaggacctattccgtgccaggttcctggcagggcactgggaatccaaaaatgcatgagagtggtccctgccttctgtcccagagtctgtttgttttgaggaaggacaccattcatctgcttagcttgccctgctccctcagcctgagggcttggaccctttgtgcctgttcttgccgtgtagttacccctattggctgtgagctcagggccccttcttgagtcattcctggagtttcgctgctccatgatgttgctgtcctcttgctcctgcccttcactgaagtggtcctggatttgcacccacaggctgagctgtcagatactgctttttgcctagtaacctccttgagcctggaactagacttttcattttctcagcctttttttttttttttctgagacatggtcttgctgttgcccaggttggagtgcagtggcattatcacagctcactgccgccaactccttgcctcaagcaatcctccagtcttggcctcctgagtaggtaggacttcaggcacacaccaccatacctagctaatttcttaatttttttgtagagttgaggtcttgctacgttgcccaggctggtctaggaactcctagcctcaagtgatcctcttgcctcagcctcccaaagcactagggttacaggcataagccaccatgcccagccctctctgcctttctgacttggatttgaattctgtctctaccacttaatagctctaatgaccttgggcaactcaggtagcttccctgatcctcagtttcctgaattacataataagattagtattaatacttagttcatagggatatggtgaaaattaaatgaaaccatgaatgtaaagcatttagtacaatccttagaatgaattctccatcaataaatgttaccctctgttattattatcgttattgaattgttatggattatgtaagtcatttataaaggcactgaataaatgatagttatcgttaccgccaccaccacacaaccccaccaaaaccagtccttttggtatcccaggcgctcctctctctaggatgaccccttcaatgcatgtcagctactctttgaccaaacctcacaatgatttgcctaatgttcctgtttttttccttttcagacctgaaagaagactataatcaatggaacaaccttattgaaggcattggaccgtcgctcaccccaggggccccccaccatctgtccagcctgtaggcacaactggccatttgtaaagtcacttcagccaagttttcatttgggagctacccaagggcacccatgagctcctatcaagaagtgatcaacgtgaccccttttcacagattgaaaggtgtaatcacactgctgcttggataactgggtactttgatcttagatttgatcttaaaatcactttgggactgggatcccttgctgattgacaaacagactttctgggaccttgatggagtggggaacaagcagtagagtgggactgggggagacccaggccccgggctgagcactgtgaggcctggatgtgaagactcagcccagcgaagctcattcccttacccccggccagtgctgctgcttcagtggaagagatgaagccaaaggacagaatgaaaatccctaccttcagagactctagcccagcccaacaccatctcttcctacctctcagccttctccctccccagggccacttgttgaagtctgagcactttatgtaaatttctaggtgtgagccgtgatcacattttctatttatttccaagtcttctcattgtatggaacatagtactacttatacttacagtagtaagttatacttgtgagcccacagagtggcagacagcatggctctcacagcacagggagaaaaactgaggtacacagaggtacctcagaagctctggatgtctttgggggttttgctaagtgtatcttgataggaaacaacaaaagcaggttgagatggggaagatgacagaacaacagtgttaaatggccatttgcacaggcctttgccacaacagagaagtagtttggtcagctaaaactcagctgcagcctggacagtagagcgagaccccatcttaaaaataaagaaggctgggcgtggtggctcatgcctgtaatcccaacactttgggaggccaaggcaggcagatcacttaaggccaggagttcaagaccacctggccaacatggtgaaaccccgtctctactaaaaatacaaaaaattagcctggcgtaatggcaggcgcctataatcccagctactcaggaggctgaagcagaagaatcacttgaacctaggaggcggaggttgcagtgagtcaagatcgcgccactgcactccagcctgggtgacagagcaagactctgtcttaaaaaaaaaaaaaagaaaaagaaaaatttaaaataaataaaatttaaaaacgcagaaggccactcccagagaggcctaggagtaccttggtcattttttcttgcctcaaatattataaacctccaacttgctcagaatcagggtgcttttattgtctgttttctggctctgaggcccttgccccaaatttaagtcagatacagactgaatttccattctgttctgtttataatatgaatgatattaatactcttgtttgcttaatgttatgttggaattttctgtttaatctgcagtagagcaagatggagagccatctggaattgacttccttctgtctttcttctgtgttcgcttactacttgggcccatgtgggaaaaaaactttaaaaggaaggaagtcttcttagggatccagttcaaagctatttgggggcatcaaactgaaactctcttctccactactcaagacttcgtgcctcagtccaagtaggtaagagcaaaagggaaatgcatctctacacaatggcccatggtcagggccaccagagcaagctgggcctagatctccacctgtcagtgactggccattctaagaggtgaaacagcagatcgttgaggctgtgagggaggatctttgaattcccatgagacatagcataagaagggtatcattaaagccctgggctctaaagttacagagcctggttttgagtcctggctccaccactgccaactgggtaaatttgagcaaatggtattctctttcttatctcagctcctgcgtttctaaaatgagggtctgcgttatgaatagttaggaggattaagtgagaggatgtataacccatgggttacttaaaagtatatttcctaccttccaaacatgagatttttctagttatagtttcttttctagcttgattgctttgtggtcagagaaaatgacccatatggtttccatccttcaaaatttgttgaaacttggttgttggcctagtatgagatcaatgttgtaaatgtgccatgtatgtttaaaaagactatatattctgaagaa

SEQ ID NO: 456 - DNA, 4182 bp, Homo sapiens
  source 1..4182: mol_type = genomic DNA; note = NC_000001.11:36084094-36088275 TEKT2 [organism=Homo sapiens] [GeneID=27285] [chromosome=1]
ggtgccaaacactggagctcagagcggggggcgcggagagcgaagcgggaaaggaggtaagggagctagggaagcgggggcgcccccttcctccgcgctggaccggggtactgatctaaaccaaaggcgatcatcctgcggaggggaagaaaggggtttgacggggaaccggactgaccccagctcttcccacggggctctccctgtccggccttcccctccaacagtaggcgagggcggaggggcgggagggcgtggcggctaccagacggggagggggccgccccgggggccgccccccagctccccagtgccaacaggcacgcgtccctggagacagaacagggctcctgcccttagatcccccacggggactggcccgcagcctggggaagaaaggaaaggaagatcaacaaggcatggttggctgggggcaggtgtggaaaatgcattaagggcaatttttttctgccatccgcctaccccccaggcatttggcacttcacacacacttcgaggcttccgggactccattattcctttttacctgctccaggacctgcaaggtccaggggtttgtgtccgcctggggacgggagggagggaaacttagttaatacctcacacaaagttgagtaaagcaagggctgtctccaagcaggcttccagcaggacagggctcagagcaaaatggacaggaacaagtcctgcgcagggggcgtgtgatccaggaggtctccggaaaggtctcccgcagcagtgttttccctctgcaggtggtgtctgtgaacaggcctaggggtttctgacccttctggtttctgtgccatggccacgctgagcgtcaagccaagtcggcgcttccagctgcccgactggcacactaacagctacctgctatccaccaatgcccagctgcagcgagatgcttcccatcagatccgccaggaggcccgggtgctccgcaacgagaccaacaaccaggttggggatgggaactcagctgggtgggcaaagggatagcccccaaccccttgacaccctctctatctggctctgtctctctcagaccatttgggatgaacatgacaacaggactcgactggtggagaggattgatactgtcaaccggtggaaggagatgctggacaagtgtctgacagatttagatgccgagatcgatgccctgacacaggcagggatccaggactgggtgcccgggggctgctgccgaaacctcccctccttccccacagctaggttgagaagcccttgatggggggtcatgagtggcatgtccatccgagtcactggccccctgctaaagtggggacaagcgctacttccccatggatggccccaccagcacccccgcccactcttttcttttctttttttttctttctttcttttctttttttttttttttttttttttttgagacagcatctggatctgttgcccaggctggagtgcagtggtgtgatcgtggctcactgcaacctccgcctcctgggctcaagcgattctcctgcctcagcctcctgagtaaagtagctgggactacaggcgtgcgccatcactcccagctaatttttgtatttttagtagagacggggtttcaccattttggccaggctgttctcgaactcctgacctcaagtgttccatccaactcggcctcccgaagtgctgggattacagatgtgagccaccgtgcccggccgcgccctcttttctagatgaaggagtcagcagagcaaaacctgcaggccaagaacctgcctctggatgtggccattgagtgcctgaccctgcgggaaagccggcgagacattgatgtggtgaaggaccctgtggaggatgagctgcataaagaggtggaggtcatcgaggccaccaagaaggccttgcaacagaaggtcagccaggccttcgagcagctctggtaagggagaggcaggtcgtccgcatgttcatgggcccctggaggctgtgtgccttcaatgtggaacacaggtattgtggatgaggagcaactggctctcgtgctacattttggccctctggtgcctgtgacagaaaccactaatcaattgtagcactcttcccactgcctggacatgggctcagaatacttctcacgaccctgccctgggcagccggtatccactgattggaagcatgagaggtgacacccatttgccaccacccctgagtagctcctgtgagtgtgtgtgtatgagcctttgtgagcgcagctacatccgtgtgccccgcaggtgtatagggctcatgggggtcagcatttccactcgattttcatcctgcgggtgtgtaggacgcgtggggtcagcattttcatccgattttcatcctgcgggtgtgtagggcacgtgggggcagcatttttatcctacggtgtgtagggcatgtgggggcagcattttcatccagctgtgctgctcttggtctcagtggctgaagctccattgtcttctgctgggaagggtcaccccagcctcctcttcctgtggtgtccctttagtacagtgaggcctgcctctggcccttgggggatggtcctgatggagtctgcgctttccccagcctcttgcaggaagtccaacagcagctcaactccgaccatcggggcaaaatggagacactagagatcgacagaggctgtctctctctcaacctcagatccccaaacatctcgctgaaggttgaccccacacgtgtacctgatgggtaagaagagtgtttcagccagtctcttctcctcccctcccaggccacaccctcatgacccccattttccctgccacctgcagctccaccacactccagcagtgggatgacttcagtcggttcaacaaggaccgagcggaggctgagatgaaggcagccacagagctgagggaggccactgctctaactattgctgaggtgacaggccacccacagctaatggatggtcccagtgtgcgctcagcccttatcttctgttccctgctgtgcatgtggccccctgcccctcgcttgagtaatatcctcaggcagccctgagtgtagaccctccccttgccctgtgttttctccttcagaccaacaacgagcttgaagcccagagagttgcaacggaatttgccttcaggaagcggctgcgggagatggagaaagtgtacagtgagctcaagtggcaagagaagaatgtgagcatctccaggggcctggacttcctgctgtgggatgagaagccgcatgcccccgccaggaggcactggaccaggcatgcacgtgagtccagcaggtggaaaccagtcactctgtcccctgcagaccttggaggagatcgctgagctgcaggaggacatccggcacctggaggaggatctgcgcacaaagctcctgagcctgaagctgtcccatacccggctagaggccagaacctaccggcccaacgtggaactctgccgggaccaggtgagagggtgtcccagtggcgcacgggccccctagccaaggttttctcatattcctgatggagcaagggcactgctgtcaaggggcagcactcaggtaaaggacagtgtggctgacttggaactcccaacccctctgcctccaggcacagtacggcctcaccgacgaggttcaccagctagaggcaaccatcgctgccctgaagcagaagctggcgcaagcacagtaggtctcgggagtgggcggaaggagcagtgagacgctgcccacaaatggggcctcttgctggctgctggctccctggggctgtcttcctgactgaaggctatgcacgcagcccaggcctcccagcctcatgggggctggggggttgtcaatgtccttccctagggacgcactggacgccctgtgcaagcacctggcccggctgcaggctgacattgcctgcaaggccaactccatgctgctggacaccaagtgcatggacacacggcgcaagctgaccgtgcctgctgagaggttcgtgcctgaggtggacaccttcacacgtaccacaaatagcaccctgagtccactcaaaagctgccagctggagctggcctagccttggaggactgcaggaggagggcagggttgggtgggcaatggaaggagggaggagagaaatgaatggaataaatgcagaggatctca

SEQ ID NO: 457 - DNA, 30837 bp, Homo sapiens
  source 1..30837: mol_type = genomic DNA; note = NC_000005.10:c180815616-180784780 MGAT1 [organism=Homo sapiens] [GeneID=4245] [chromosome=5]
aggagggtattggccaggtcaaaggagagggtggaggaaaagagccacgaaataaccgggagacaagctttcggaggcttttgactgactggatgtgggaatgttgtggaagacttctggcctgccatttcctgagaacgggactgctgagagaggagctgggaggagcactgcaaatttcactttggacacgtgagtcagaggtatctgtgaggggactgagttgggagggcaagcagggaattggacatgtgggcctggagcacagagaagggacttgagcatgcatatttgggtgttccctccaaaacttatgttgaaacttaatccccagagtggcagcatggagaggtggggcctttaagaggtgattggatcatgaaggctctattcccactaatgaatggattcatcatgggagaactggcggctttataagagaggaagagagacctgcgctagcaccttagcacgctcagtccccctgccatgtcatgccctgaacccctcaggactctgcagagagttcctaccatcaagagggctctcaccaaatgcagcccctcaactttggacttctcagcctccagagctgtaagaaataaattccctttccttataaattacccagtttcagatattccttgtttttaatttttaatttttttttttttttgagacagagtctcactctgtcgcctaggctggagtgcagtggcgcgatctcagctcactgcaaccaccgcccccccgggttcaagcgattctcctgcctcagcctctggggtagctgggattacaggcacctgccaccacgcctggctaatttttatatttttagtagggatggggtttcaccatcttggtcaggttggtcttcaactcctgacctcatgacccacccgcctcagcctcccaaagtgctgagattacaagcgtgagccactgcacccgaccccagtttcagatattctgtcataagcaatagaaacagactaagtatctttgacatggagtggatactggaagccatgtgacttctgtgggatcatctcgaaagaaagtgtaaaatgagaagacacaagggcccaggaaagagccctagggaactccgcatttgtacagcaagtggtgggtaaagagagaaaagggagaagcctgctaggatgctgaggaggagcagccagaggagggggaaccccagagagcgtgctggcgtgggagtcaagagaagtgtgtcagaagaagggagcggttgacaatgtcagaagctgccaagaggcacaataagattgagggaacaagtgagtgtggttgtttctttatgggccagaattttaaataccaggatgaagggcacctaacaaatagcaaatacacaaactaacttttgtacctaccagacttcagactaaaatcggtacaaagaatactcgccagggtaaggagaagcccaggaaattacaagagatatctagtttctgaaatgaattacaatgatcatctgaacaaatagtgtgaaaaaatatacacctgaaaaaatgtgtgaaaatggccaacaaaacattgaaaatcagggttactggggaagacttttactgccagttattaaaatttactatcagctgtattgactggaacagctgccagaataggtaattcaacagccaggatgggaagccctgatacataagtttggtggggactgtaggtagcccctctggctaccttctttctagttgaataggttacatatctaactcccttgcaattaggttcacctactcaggtgcccttgagttagacttgaaaggcagaagacagcagaggccattttactgctgcttctgatggagatgcgaggcttccataggaaagaggggtccactggtataaagagcccgacaaccatgttctccagatgttcagtccctcttggccaccccacaccaaatgacagtccgcgagactctgcccatggagactccacctgctggtcctctaggtggagtaactgataacaaaaatctctagcttactcctaagtgtttattctgaaggcagtatgtacagcaagaccagacttttggcccagctagcggtgactactgcaatgtcaaaagagcacataaacagacttaaaaagcaaatgacaaactgggaaaattgctgtaacataggtaacaaagggctgatattctataaagagttcttgcaaatgaataagacaaagatgaatccaagtgggcaaaagatatgctgtaggcaatctgcaaaagtgatgcataaaaacaggttcaacattactagcaattagtggaataaaacttaaaacaacaatgcaaaaccatcgttctatcatattaacaaagatgacaaaaaatggtgtgacagtgcagggtgtggagaaaagttggtgtcaaagctgtgccatctttctgtgtatctttcatatcaaacaaacgccttcaacaatgagcacacctttcgacacgagttcccagactttatcctaaaaaaaaaaaaaatgacgtgcacacagatttagctacaagtaattttgcaaaagtgaaaagttgaaaacaacccaaatgtacaaaaataggggagataattatggtacatttgtataatagtatgccacttggtcattaaaaatgccatagaagtatatttttcataaacttatttctagctgctggttttacaggtggtttttgcttttttattttatcatttatattttcctgtaattattgcatattttttaataattttttaaaaccggcaattatatggtgaaaaggagagaagggcattagtaaattctgaagcaactgaaattaaattgtaattgctcattaataaataaacatcattacatactaacatttaccttaaataaactagatttcatttttctactatgggaggaaagacctaaaatacaaattgactcgaattatagaaaataaagttacaattcaggaatatctgtctttggactgtgaaatttgtacctgttatgtatgtgtgtgtgtgtgtgcctgtgtgtgtgtgcgtgtgtataaaaaatatttggaaagatatccactagtttaaaagtggttcctttcagcagggtgggatgagagggggacaggagacaaatttttatttacacaactctgtatgacttgttataacaagcacgaaaaatcgaaggtcacttaagtaaaaatggttataattatgaaaatacttagaaatatgtaaagtctctatggtatgattagaaatcataatgcaaaatctgtatactgtgcttatacctatgttcatatatttccatgtgagagaagcccgaaggggaatactctgcggtgaaagtagcttttcaagttcattcattggttcatttattccacaaatgtgtgctgagctgctaccatgggccagccaactgttgcagccaccgggatatagcaatcaaaaatcaaatgtgcctccactcagggaacttaaattctagtagtgggagacagacaatacatggtaaacccggcgagtatttcaggaagtggtgagcgtcctgggaaaagtggagcaggccaagggagactagcagtgctctgggtcaggggcaggtttaaacaggttggtcaggaaaggcctcactgaggtgacatgggaggaaagatttgaaagagctgaagggttcagtcctggaaatgcctggaaggggtgttttacaaatagacaacagccggtgcagaggccaatgcagctaacagaggaaggggagagcaggtcagacagctaggcaggccagtgggttgtccggctctgcagccattgtaaggactttggcgttttatttcaagtaaactgaggagccgctgtgcagtttggagcacagaaacgacaggatccctgtggctgctgtacggaaacccagcgactgggagggtagggagggcagggagacctaggtgttcaggtgagggatgaaggggggtgtggacatgttgaggtgttgcatcctagacacagattgaaggtagggtcaacaggatttctagtcagattgtgtagagggggtgagagagtgaagctggctcttctggttctggcctgagtaaatggagccgccattaatgcccatgggaaagacaggtgggcggagaaggtttgaaggtgggggaagaaagggtcttattttcttcttccttgcaataatatatcccaagcaatataattaagcaatatgtatttttccctttaaggaaattccaaaaattatatcgttccaaataaaaaaatcatctccagagtcctgacgcagcaaccattacattcccagtaatggaaatgttaagtcagtccgtgctctggagaaatcccacgacagaacacaggccaggagaccgggcctagattccggttttcgaaccgtgggggcaaacacggaggctgcaaatccatccccagtccggcaagattctcgaacatgtcgggagagggctgcataggaacttcaaaaacgagtagcggctcccctggattcagcgtgagggggaaaccgcggggcaggttcgaaactcaggagtccgacgtctgaaggagcgggaggctgcttccgaggagcccggggcacgacgggaagggccgcgccggccaggcagccctcctcccggcagcctcgggcaggccgttcacgcgccggcgacggcgggcccggccgcaggtaccaacagcacctgtcagagggcagcgcgggcgcaccctgcaagggccctgcctcgtcaagagaggcagcgagaaacagcagcgatgaacgaaacaaaaccttcctccaccacggctacacagagctcgcgtccgaggaagcgggaacacacaggccccggtgctttccgaaaggcttctcgccaggacccgcgaccagcgtggggcggagggggggggtcaccctttttgagaaaccaggtcaagcaggccgtcgctgggcgacctttgggcggagggagagggcagggctgcaccgcacaggttccgcccctacttcagcgtcctcgcccctcccaagctccgcccagcaccccaagggccaacccccccgcgacgcatgcgtgcttcttcccgcgcggctccacctgccgcgcgcttccgctgctggccagtctcttctgcccctccccctcctgtacggccgctactctgcgcccggcttccttctcacaacctggttctgcccacacctgttcttcagccctgtgaacagtggctgtagaacagtctcaggccctgcagacccacctccctcgctcccgtggtggcggtggtgacgggctggggacgttgggtagaaaaatgggcgggatgtggaacgctgcgttgccggggcccacttccggaggacgggcggaagtggctgcggtggatggtgggaggggggaaggagtgcgaggggagggccgggccgctgggggtcgagggggtggggcctgggccagcgctggggatcgggcctggggcctggattgcgacccgcggcgggccgcggctcctagccgagacggggcgggcgggaaccaggtaacgacccggcgcagttagagcgagggtcgtccgcagggcggacgggtgggggtcagagtccaggaagggtcgcagtgtcaccctcttctcttgtgaacacggggcacggggttccggggagaagggtgggaggagttaaattcttggagggggtggaggtcatgtggacgccacgcccctacaggaaggaaaggagagagagagtgtgtgtggatggatgtgtgttgagagagagaatggatgtgtgtgtgtttacgaataaacttggaggggagggggcaacaggggtgggttttcgggctgagaaatgggaacactgtggggctgctgcaagcaggacttgggccttaaacattccaggagagtgttctcgggagtagccccgggaaggactttaacagaggttgggaattacatctctggcacagttttgcaagcagagggggagcttagttaaaggagcaaagaatgcaagtggaagatgccagcatctcggtctggaaaggatttattaactagttgaagagggctggtggattaaaacactcagcaccctaagaagcttgggagattcgattattatgttgcgctttagacaggagggcaggagaaagggcgttcttttctcgatttcttagaagagtctccggttacttttctgtggtgagaacgggtacgatccatcttttatcctgaatcatgtatgtttgtacatacatataatatgtttatattatatgtgtttatatatgtaaacactattgatgaggtgactgtgttctggcgtgtgatacgtgagttaagtaggtgctttgtataaccttgcggagtgtttaacgaaggtgttttgatgatagagcctagtatggactcttaggtggggagtggaaactagaaggttttaggactctatttgggtatctagattagagagcgttataatgtttaaatgttctgcaggttaacacagaaatctgcctcctgggccatgccgcttctaaggcctgtttcttctcatgagccccagcacaagacagatgggccagttctcacagtggataacttcccctgcctgagcaagagatgggatagtatctgggatctgtccatcaccagactctgagcttaataaggcagctgaatgaagggaggtaacggacccctgagaggggcactgaagtctgcagtggggggggaggggcctggacacaccccttcccccccagactcctccccgtcagggtcagctcagccatggactttggacctggataagaagagagaagctgcactttggtggatctgatttgggattctcagttttgaaaatggagtgctgaatggggatttgatgatctcctggagagcaactgagacaagagaagaaaggtaaggctcctgtctcatttcccacttaatgtcttgctgtgcctgtgcagaaggtgttgagctggcgagttcgcggaggctactattcaggaaatcttatccagatgagtacactggaagctacacctctccattactctgtccaggtatagacttgttcccaacttccccttacccaagctggatgagtgccttgtaagggattgtgagcaatggcagttgtgaggttaggccaaggagaacatgataataattgaagacttctgaagggaggttggattagattacctttaaaggcccttccaacactgagataataggattccaagtcagtctgggttaagactggaatggattacctaggcagaggcagctgctctgttttggggagctaactgaaaaggactgctggtggggggagaaggcgggaatggtctagataacctcctaagttgtctcccttcctacttctataaggggagcttagcccatgaaagctcgggaaaagagcagaggaacagaacacaggtttgggggtcaggaaggagtacttgtgttctagctttgactttttgagtcagtgtacaaccctacacaggccatgttctcttcacctacaaaatgggggaaaactgactttccaggtcccttacaagttgttacgaggagcaaatgaaacaaggattttgaaaagtatccagggccgtgtacacaggaaacaataacatcgatgttgctctacgtgccttaaaagcacagaaacaactctgagtcaggagttctgttttcttcttgaaatagtgtgctggcaacagcctaagaagatgtccttagtgaaaagcctgcccctgaatgtgtttcatcatcttgttggtaaacagtacttgggatcatcaagttgtagaacaggtgaatagatccaaggagaacttggattgaaggagtcttgcagatactgcattggcccttatggctctccagtccaatttcagtgtgcccctttgaggtagctgattaaagagggggtggaaggatgcttaagccttgagggcaggtgtctggctaggcacttttcttggagtgagtggtggtctttaccttcctgtgccatatgctagttatctctcccgctccttaagatgacgtttttttccagacatctcttcgccctttgtattttctcaggctgtattccctataaaagcagccctgtttgtctttatcttctcacttcctgtctgctccctccttcaattccaatttacctgtgccaagatgcctgcttttcccagggacaacacacagcagaaaggaggggtagagcacagtgttgggaattttgagagacagtagggtatggtggcctgggcaaagggcaggaggcctggcttctggcatgtctctgcctctccctagctcagtaacacctaggcctcacatgttccttgaggatgggtgacagtgaggtcatctgcaaactgaaaatcctgtacttatgccttactttccatgttaaatttttttcttccatccccttccccagtctttccttttttgccacaggagttttcctcactccctccagcggcttgagaggtgggcagtggcctgggtggagctgctgctcccgagctgtactttctcctctggtctggtgcctggggcagcccctttgaggccaggctgctcctttataaggtgtgggtctcaagatgggtgtaccaccttccccagcttcacccagcaaatttctgttgccagtctttgcttagacacaggggtcacagtgatccctcggggatacgtgatgccacggtgcctcctcagccatctctggtatcccaggtaccagggagttgcgtatttgcgtaatgcttctatcacgtgatccagtcaatctgttttgtctgttttccctcaccactttgttgtgaggagaacagagcagggattcttttcccagtttgaggggaagctacggaagccctgagtgggaagggtttgcctaagggtagagcggtaggcactgaaatcacctcccagtgctgtgctgtttccacagcatctgacctgaccaggccatctgggttctgctgcaaacctccagggagagaagctctgtgccctgccagacagcctctctggtagaacgtttcctccttagagtgagcaagcattcctctccctgaccttcccaccctcctgccctgcacctgacccttccatgagacagtcccttcaagacaaccattggctttttcacatgggcaccaggatgccaaggcatagcactcagcaggtgtcaggctacttagccaggagcagtgatagacttaaccagactgtgtgtgcattttttttttgagacagagtcttgctctgtcgccaggctggagtgcagtggtgcgatctcggctcactgaaacctccacctcctgggttcaagctattcccctgcctcagcctcccaagtagctgggactacaggcacacgccaccacgcccggctaattttttgtattttagtagagatgaggtttcaccatgttggccaggatggtctcaatctcctgaccttgtgatctgtctgccttagcttcccaaagtgctgggattataggcatgagccacggtgcccggccgtgtgtgtattttaactcaattaattatttatatccttctttattccaaaaagaattgtaggtggctaaccaaaagttacatttcacagacattgtttagtgattattatgttaatctttcctctttgacctggatgagatgaatttctgggtctccattgtggggtgagggagaggggcaagcagagatattaggaggcagggagaagggaaacaaaacactgatttaaaaaatttgcttttactttttttttttgagatggaatctcactctgtcacccaggctggagtgcagtggcatggtctctgctcactgcaacctccgcttcccaggttcaagcaattctcctgcctcagcctcccgagtagctgggactacaggtgcatgccaccacacttggctaatttttgtatttttagtagagacgatgtttcactatgttggccaggctggtctcaaactcctgacctcgtgatccgcctgcgttggtctcctaaagtgctgggattacaggcgtgagccactgcgcccagcctgcttttacttttactgatgttttcaagccaacatatgttttaatttaagggcatgaattctttccaaattgtaaaaagtgtcagggatcttgggcatggtttatgggagggcagtttcctggaacagttttcacttccttttcatcttttcagttctcttttgtcagtggtggagtgggcaggggagagtattgttcctctgcctaatcttgtgactgtttatcctcctggataatctggtctaatcttgtgactgtttatcctcctgttttttccttttgcacataatccaatcccaggcccacccccagaatcctggccccttgtttctatccttcttactccagtcactgctccccatgtaacctctatcaagagctcagagcctcttttccccaggtcagtttggcactcatttaccctggtttcttgcctctcagaccaagtgcttgcttttgcctccatgaagcccattctgattccctaaccaggccctttctttttgggatggtctcttgcagtccgggaatttctccttttggatcttcctgtgagccttgggatttcagccaagggtggtagagatggggtgtgcgttacagtgcacgaacagccgccatcctgtttccccttcacctgccttagatggagaagtatcagggtcagtggtgggaatctgatcttcccccacctttcagcaccccctgatgtctgtcctttctcctggaaggtgattttggctcctcatgtcttggatctacaaaccagtgtttcccagccttttcacttttaggaaacacaattgttttttcctttacgccttgacacctagtgtgagtgtgcagagcccccaggcccctgactcctccattaggcaaacatagggcagaggtgacagacactggcctctgactggcatatccgcctgggttcgaggctcctgccacagtgcgcgcagtcagctaaagtggaagccacgggcttcccgcacatcgcacactgcacacggcggcctcggtgggcctgcccttctcccactccacctccaggtctgggctctggccacttaagcggaggcttcacggcagcgcctgagaggagacagagccctctcaaagcactggcgctggaggatgtgtgcgggggtgttggggggcgcacaggagtgcccggtctaaaacctggctatgctccccaccaggtctggtggcttgcagcacgtttgcacttaccctgagcctcaaactagttatctgtagaatggggatgataacgctcactccgcagagctgctgaggcttgaaggacaggccgagggagggtttggcccgtgaggcccctcaccatgcctggtgaccccttagcagttttgatttaggtcctcgcctccacgcaggggcctgcgggtgcgcgcggccctttgtttctctagaaccctgcacgattcgtggtttcatgtagaaacaagttagtgagcagtcagtcagtaaccacaggccgcagagttccgggctgctccgtgctctggaacacgggggaggggttgatgtcaggggcgtgggtcctgatcacatggcagcagcccttcttggggaagtcagctacccagcagcctgtagtcctcggctacccaccctcaccgcctggggtcccatggtgagacagctgggtgggcatcaggcttctgcagagggccaggccggagggagctgggcgagggagtggggctggctcctggcttgcaccggcctcgtggaatccaggcctcagacctgatcgctggcgaaactggctctgtgcgctggagcccctggtcttctgcgtctgtcctcctcccggccagactttactcctggctcagcgacaggtatttgctatggaagagctgtccctccctcccctcggtgggcctgggtccacctccacctcctcttcaggtccgcaccttcctcccctttaaaacaccagccgggcgcagacccgttctaggcttttccatggtgcttccgccaaagcttgtgaccgagtccttcccgcctagggctggtgggcctcccctgctggtaggtctctcttcgctttctttactcagaactgaagctctcattccccacccaccaaggaaaaacaaaagggaagaagccacagctggccccggcttgctttggcacaggtgtttccccccggccccccgtcgggcaccctggttcctgttctgtccctgccccacgcgaccctggggctcccacccgggctcctcagcctcccctgggttggggtggggggactggctcccagcccttggcctagggtttggtgaacgcctttcctggactgcgggcccacttcaggcgcggctccaggctgggcagctgcgctggagggccgagggcaggggtggggtcgggcgtccaccctcagggttgcgccagggagccggaaagccgactcccgaagttggggtcctgggaaaacttgggtcctgggttgactgagaagcggcggggaaaggaggcgggccaggaggagggggcctggcggacgccggccggggggcggggcgcggcggggctgtcggtcacgcccctcagtccgccccgccccgccccgcctgccggggaagggccacgttgcccgcccggccgtccggccccggcgcgccgcagaaagggctggcgagtcgaaaggcgaggcggccgcggcagcgcttgggacgcgcctgggcaccgggctcgctccctgcgccccggagcaggccaagttcggggccaggacgtcgggaggacctggtgagtaggtgtccggggacggaggtcagaccgggggaggcctcgcgggcgccgagagggagcccaagggacgtcgggtcgccccaaagccccggtgcccatgagtgctagcgagagggggcttggctggggagcggcccggtccgacccggtgccagctgcgcgttagtcccttcccgagccgagaggttggaactccgccttctgctttcggaatcccgggcctccagctgttagaggaagggcgggctccgcggactggggaggatgttgtgaaactcggccccgggcgtccgtgcgtgcggggcagggagggggtgggattggggagtggcctttcccccctaacctcactccagcatcctttccccaagttaatagaggctgattctcctcagcagaaaggaaatgttgattcagtgttgaaatatatatataataagttggcaagaaaacttttcttcctgtttgctaacgtgtgtggagtagagagccccgggacgtgcagtgcccgcgtctgataaactctgaagtagagggactgtggctggccggctccctgaaggctgaagcttcactttggttaacccttgctgctgtagtgggtctgccgttttgttttagaacatcactggctgagatgttgcccagctttattttcagtcatttacggtattttttcaggccgtgtagcctttgctcttacgtgctcacatcatccaggatctgccttccatcagcaatcactgcgtcctggtccttcccaattctggggaccattgagctcacccatttccctgcttctgtgtctcattctcactgttagaagcactgcggtatgcctgacctcagtggcctgtgttaacaagggaaactcattactgttcggggcagtagggaaattgtcactgtcgtcagtatccaggcagtgggaccttgtgatgaaccaaatcaaccctgtcaccttatagatgagagaactaaggtacaagtgggtcaagtgacttgtccaaagttgcctggcttgctggctggatcgcctgaatcccaggcctcatgccttttgtggcacttgtatttagctcttcttttccaggatgaataacctgcatcccttccctcctaggtcttattctctcaactcttgaattatttagtgtatcttctctgactacctttcttttttttccgtcctgaaattatgggcctggtacatgatacaggagtccagccaaggtctaagaacgaacatgaaagcagttcagttagagttccattacctgtgacatgtctatattttctggaatttttacgtagtgctttttaactttaagcaaagcagagatagaagggaaaatctgttaccatttcttccacttctgtacttaattttacagctaaatataacttctcgcttattgctcatgattggaagttgactatctggtgttcacttgctatttaagaaacattttttgccagataaaggaaataggctggagaacaccatggtatcagagtgttagaaaggatctcacagctcctaggcagtccttcaaatgcttcagaaactgagtgagccccataggggcaggtggcgcctacccagagccacctcggttttagctgaagggttttgtactgaaaagactcacttctcatctcccaccatggtgcagatgtctttgtacctggtggtgtggattggctgtgtcacctccctaaaggagttgtgaaaactctagaaagtcaaagccagttttgagtctgtgccttgcatgccagtctcataaatgacatcattaggaactcaggtcaggattaagggcagttgttctatttaaaaaggaaggtgtagcagattgtattttccctcaagggcctcacccgtaagtatccccttccacatgtagttatagtttgacattgtccacttcccacctagtggtggggtttatgattctctccccttgcatgtcaatagggacttgtggttcccttgaccagtgagtaagacagacctgatccaaggctgaatcaggaacaggatacactttcacctggcttgcccgctttcttggaacactcacctttggaatgcagccaccacttccaggacatttccaggccacatagaggggttctagtgagcactcctgctgataaggtctcagctgctgccaacatcatcctacagacatgtgagagaatgtgagagcctctaggggcatctggccctcagcttttgagtctttcagcaaggcctcaggcatagtggagcagagacacgtcatctcctctgtgctgcactgtccacatttctgaccaatagaaactgtgaggagtaagtgataactattgttttaagccactaaatatcgaggtaatttattatgcaggagtagatacctactaaggaaggagacatgagtggagacagggcctcagtgtttggacttggagctgagcacagagggcagggagggcacttgccctgcttgtcaagattatctagagtctgtttctctcattgcttcaggtactgatggctgcataatgagtcaccccagaacttagtggcttacaacaacagaatcattttattaacatctcagctatgtggttcttgcttgtggtctttcacgccattgcagtcagctggggctgggataatctggagggctgtctcctgtgtctagcggttgatgctggctgtcagctgggaccttagctggggtggtcagttggaatacctatgggggtcctgtccatgtagcagtgtcctgtccatatagcagggtcctaggagtcagcatcttaagaggaccaggtggaaactactgccttttatgagttagtctcacaagtcacatagcatctcttcccagaaccaaagggagggaacatagaccctcagctctggaggcaggagtgtctttatcacttgtaagaagagcatatggaatgggatatgtgcggtcatctctggaaaatgtcacacttcactctcttgctgctgcgttggccatctttctccctgatttcggtaatagtgcaagcagtcttccatccagccacttgaacctcatacatgtgccaagcactgtggtgggcacagaggtcatagagtcttttttcctaaggaggaaggtgggagtcaggtcagcgtggccacagattctgttacagcgtggagagagtgctgtgggagtgtagtcatagggaggcctggctctgtctgtgatgttacagaaggagtcacctgaagtggcctgaaaggatgtgtgggtggctggcaggtggcgctgtgggtcaaattccaggatgagggaccagctggagcagagacacagcagcgtccaggtatatgcttactggggaaaaagcagcctgctgaggccagagtgcagggtccatggggttagtggttggaggtaaggttgaaaagggatgtttcagacagtctgtctgaagggctttggatgtcatcataatgagtttgagtttgagtttgtgggcagtgcagcctctgatggtttttaaagcaagttaatgtcgtgaccaggtgtacttgtcaggaaggatgcgctgttgctgttgggaaggtttgtgagagggaagcaagattagtgacaggtggaccagctgggaaactacatcaagagtccagacttaaaacagtgtttcctacgaaggaatgagttcaggttaaagggctggagggcttgacatgggatgctagcagtcaatgagtaactttgtacttccattttcatagttttgaagttcttggtcctagatgtatttcagaattgagaattttttggattttgaaaagatgatctggtgaatttactctgtagtggaagatcagaagcagcatggcataagccaccatgtttatttctgtagcaaaatgtatgaatagccacagcaggagagagaaaagactataaatagccccatattagatcagatcagattttaccaaatgaggctggatgaggttttactgccaattgagtttagaaaacttctgtgttttagtgcttcttggatttggcagttacagttgaggaactgtggatgtttttagatcccaggcacatctgctgaatgttgagagccctagcacagcggcttggcagtgctggtggagccaatccctgtcttcatgtagcttgcagctgagggggcctgagagaagttgagcaagtggttgcgcttgttgctgttggtgaagggtaggtggaccttacatggtcccaggcgtcaaggaaggcatcttggcagagacacgaatcagagtgtgccaggtgaagaagatagggaagagcagagctggcacatgggcacatgcaaagaccccgacggtaggcttggctgttggggtaccagacgggagtgtggtagagtggagcaaagaaaatggggagaaaggagtgaaataacggccgatatttacgttgtcatgccggcactgttctaaacacctaacatggctcatctcatccgatcttcacagcaacccagtttgagtctcagaaatgtggcaaaacgtagggtgatgcctctgggctgtctggcttgcctttgttgctgctgcactctcctgatggtggcctgagcagtgcttcctggagaagcaggtcaccgctgctggccaaggtctgggcttgatcatccttttgggcacagccagttgtgagagggtgtatggctcctggttcatgtgtgtgcacacagcactaacttccaggcagagctgaggatcctatcccaggaactacgtggataaacagtaggaaaatagcactggggcccaggctgagcctaaggaggtgggctggaactaggggtgtcatgtcctcttatggcaacaggagcaagtttgaagcacagggctgtggggtggagaacaagggcccagggattgattaaggtggaggccagggcttggccggggcagcttttcctgtgggctctgcagccactccatgtgtgtgcagacttgccaagtaaaaactcagtcagaagactggtttgctctgcatggcttagaagggtggggcaggaggtcctaagcatcaggtagtgggtgtgggccaccaaattctgatgtctggagaagagtaaaaaggcatctaaagggtgcagaagttatctcaagggtcccaggaggctttgccataagggcctgcaggtcattgatgagtcagggacgggctatccctctgggccccccccccctttttttttttttttttttttttggtgggggatggagtcttgcttcatcatccgggctggaaggcagtggtgccatctcagctcactgcaacctccgcctcccaggttcaagggattctcctgtctcagccttctgagtagctgggattacaggcacgcaccaccacacccggctaatttttgaatttttattttagtagagatggggtttcgccatgttggccaggctcctgacctcaggtgatccgcctgccttggcatcccaaagcgctgggattacaggcttgagccaccaagcccagtggggccccacccttctaagccatgcagagcagcacttcactgaatagagttcagtccctcttctccatccccatcctgttatataaagtctttttcttgcacagtcatttaggaggtgggaagttgggagacagggaatcctggccattagattggagggaaagttccaacatggacaacatcctgaggggagagcgaagaagaaactgaaactcttctgggcccagtggctcacacctgtaatcccagcactttgggaggctgaggagggtggatcacttgaggtcaggagttcaacaccagcctggccaacatggtgaaagcccgtctctattaaaaatacaaaaattagctgggcgtggtggcaggcacctgtaatcccagatactcgggaggctgaggcaagagagtcgcttgagcctgggaggcagaggttgcagtgagctgagatcatgccactgtactccagcctgggcaacagacagagtgagactctgtctcaaaaaaaaagaaaaaaaactgaaactcttttgtgcatcactcttttcttccacataaactttcttaaaaatcaaatatggggatatggcccacagctctgagtagcttcatccatctgtatggccccagctgggcacagcagtaaggccaactgaaacgacgtttgccctgaatttctcggtcacttgacaacatgtatctaattgatacataatatttgagccctgatataatagaatttaattgcacagttacatggaaacagacttgacgtttctgagaagactgatgtcctggcgtggtgggggtggttggtttctaggaagaagacaagtggttggtggtgaatgctggcaggggctggtgaagtctccccaggagggagacagaatccatgtctctttagaggcccttcaggatcagcccttttataccagatctgctggtttgagagcccagagcctcagaggttagatctgaggcccaaggttttggccaggattagagagtagcctgtgaggcagagggcaactggcagagctgttggtgtaagagggtgcacgcctgaagctttggggtgtaaagggtagaccagaggcaggacagtcaaggagttatggtctggagtggcagctggctgggaattggggagtgtttcagatcctttcaagtaatgtggtctggtagagcttggaggattggtgggaccatgcctttttctcactggtttgtgtcctggttccttcccagagcctggcagagagcaggtgtgtgatacacgtcgtcaggtgactgaccgaggaattcagggcaaacagatcatctcaatttgccttgctgatgtgccagctgggattacgctgatggatgaagctcttcagagctatgggcaatatctacatatttgattgtcaagaaacttcgtgtggaaatagcttcaaacttacacaaattgcaagaataaaaaatagtataaggatattcgtacacactctctttactcagattcacctgttaatattttgctccatttgctctctatgtgtgcagagtatgtttttgttctgaaccatttgagaagttgcatctatcctggtcctctacttctcaatacttcagtgtgtattacctaagaattggaattaatcagttatcactgatactttaacctactgtccatattccacctttgtcattttacccaataacgtctttttaaaaaaagttttttgaggtttcattgacatacaattgatatcaatatgtgcaaagaactgcatataaagtgtacaatttgataagttttgacatatatgtgtgtgtgtgtatatatatatatatatatatacctgtaaaagtatcaccacaatcaagataataaacatatccacccttctagaagcttcctaatgcccctgtgtagtaactaccctactgcccttctctgcctccatccccaggcaacaactgatctgctttctgtaatatagattagtttctattttcggcagttttatgtcaatggaatcacagtgtatgtgctcttttttgtttttcccaaaaagacccatattgtgtaattatttggagattgtgttgtgtatgtcagtggtttattcagttttattgctgaatattattccattctatgagtaaaccacaatttgtttatctgtatttccctgttgatgggcctttgggttatttccagttttgagtgattatgaataaagttaccatcaacactcctgtgtaggtttttgtagggacatggctgaaagtagaaagaaatggggcatgcaggagagactgggcttggttataacagcctgttatccctggggaactagctcactcaccagaggacgttaggaaggatctgcccctgccccccttgtgatccaaacacctaccactagaccccacctccggcagcaccaccacacaggggatcaaatcccaacatgtgtttcagagaacaaaccatattcaagctatagcatagctacgtaattattataacactattaataagaccatctttgccttgggaattttaagtagcacctttattacatattagatttttttgtgtaatgagtctgtttctggagcttaaattctatttcactggatggtctgtttatttatgtaccagtaccacgcagttgtaattatggaggttttgtagtatgccatatatatatatatataataaaaaaaaatttttttgagacagagtctcactctcttgcccaggctggagtgcaatggcacaatccaatcacagctcactacagcctcagcctcccagactcaggtgatcccatctcagcctcctgagtagctgggaccacaggtgcgtgccaccatgcccagctttttttttttttttttttaattgttacttgtagagacagggtctccgtgtgctgcccaggctattcttgaactcctgggctcaagtgatcctcctgtattggcctcccaaagtgctgggattgcaggtaggagctactgcatctggccagtatgcagtattttcatatctggtagggctgagtccctcctcacagcttatttttattgttttcctagtttttcatgtgaactttactgtcagttcgtctagctccataaaaaggtatttttattgggatttttgatgatgctgaaatgtcctgaccaagaacaagggatattcagatgttcttttgtgtctttcaggaatgatagttttgttcacataagttttgaatgtttaagtttatttaagtttatttctaaatattttctcatttctctggcttttgtaagtagggttttctcatccatgttttcttctcatgagttatttgtggatatgaaggctatccattagtatatgttgatttttatattacacttccttgctcagttcattattgattctttttgagttttccaggcatattctcacaagtaaagataatagaaatagtttgcttcctttccacttctgctttgaatttttttttcttggttcatttgcattggctgcttcctccagcaaaatgttaaataaccctggagatgatgggcaacttcgttttgctcctgacattcgtggggtgcctctggtgcttccctgttggtaaggggttaactgtagccctgaggtgggacatttgattttaaaaatcagtcatcttggggcgcttaggttagaggaatggtaggcagatgctgtcactccttgcccctcccctcctccttcccacctggaggggaaatgaaatctgacaggtagaaagaggggagttggggttctttttctctctccctccaccagcatcactctctgcctctccctcaaaaatacgttcctgggtcaggatatatgttgactccctagagagctctggagtcaacctcctggccttcctccaccctcactcttggccttttcctgcccccatttcctctacctgtggggcatggagccacgagcctttgtgtgacggtttgctttctctctcctgtctttaggtgcatggctgcctcctaatcccatagtccagaggaggcatccctaggactgcgggcaagggagccgggcaagcccagggcagccttgaaccgtcccctggcctgccctccccggtgggggccaggatgctgaagaagcagtctgcagggcttgtgctgtggggcgctatcctctttgtggcctggaatgccctgctgctcctcttcttctggacgcgcccagcacctggcaggccaccctcagtcagcgctctcgatggcgaccccgccagcctcacccgggaagtgattcgcctggcccaagacgccgaggtggagctggagcggcagcgtgggctgctgcagcagatcggggatgccctgtcgagccagcgggggagggtgcccaccgcggcccctcccgcccagccgcgtgtgcctgtgacccccgcgccggcggtgattcccatcctggtcatcgcctgtgaccgcagcactgttcggcgctgcctggacaagctgctgcattatcggccctcggctgagctcttccccatcatcgttagccaggactgcgggcacgaggagacggcccaggccatcgcctcctacggcagcgcggtcacgcacatccggcagcccgacctgagcagcattgcggtgccgccggaccaccgcaagttccagggctactacaagatcgcgcgccactaccgctgggcgctgggccaggtcttccggcagtttcgcttccccgcggccgtggtggtggaggatgacctggaggtggccccggacttcttcgagtactttcgggccacctatccgctgctgaaggccgacccctccctgtggtgcgtctcggcctggaatgacaacggcaaggagcagatggtggacgccagcaggcctgagctgctctaccgcaccgactttttccctggcctgggctggctgctgttggccgagctctgggctgagctggagcccaagtggccaaaggccttctgggacgactggatgcggcggccggagcagcggcaggggcgggcctgcatacgccctgagatctcaagaacgatgacctttggccgcaagggtgtgagccacgggcagttctttgaccagcacctcaagtttatcaagctgaaccagcagtttgtgcacttcacccagctggacctgtcttacctgcagcgggaggcctatgaccgagatttcctcgcccgcgtctacggtgctccccagctgcaggtggagaaagtgaggaccaatgaccggaaggagctgggggaggtgcgggtgcagtatacgggcagggacagcttcaaggctttcgccaaggctctgggtgtcatggatgaccttaagtcgggggttccgagagctggctaccggggtattgtcaccttccagttccggggccgccgtgtccacctggcgcccccactgacgtgggagggctatgatcctagctggaattagcacctgcctgtccttcctgggcccctccttgccacatcatgagctgaggtgggaccacagtccccaggctgcatcggcctgcctgtgtttccctcttaggtgcatttatctttttgatttttccgagtggcatttaagtgcacaaatgataacaagaggattattctcccgttctcaagggagtcagatcaggggaactattctagggtatgttgcggggtattaagcaggaaaccactgtgtggtggggggcactgggcttgttggggccagaaatgtccacgtcctgagctttctcctggagcatgtgcagagagtttggcaacgttcgctctcttgaccagaccccttctccctgacctggctcttccagccagggcacgagccctccttctatacctgctccccttcccccagtggggactgagttatgggagaaggggacatatttgtggccaaaatgatactaaccaaaggggcttccttgtcagggcctggtggagttggtgggtcatcggggctcactgcctcctgcccttctctcctgtctgacccccacttagcccttctctccttgcagcctagcagtttatagttctgagatggaaagttgaagggggcaagcaagacctctcctcagcccatgcccagctgtcaggagagaggtgcagggaggaaggccttgtgctgggacaacctctctcttgccttacctcagagagggactatgccctgacccctcctttctgaaaatcagtgccctccctgttgctctaggaggctcctgctggcttggtagaagacagaattcgatctgcctgtccctttttcccctggggtttgacacacaggctcctctcagcatgaggtggagcagtgaccaggtggagcagtgaccaggacgcctctggcccagtgctgcccagcctccccgcccgctcccaggcgccccatgtcctcacaggccaggacgccatggcaggatggagaggacttggtggatttttgtttcttgcctgacctcagtttcatgaaagaaagtggaagctacagaattattttctaaaataaaggctgaattgtctgaaaaatatttatgtgtgtgtgtcctggaaaaggaggtggcaggcagggaaagaaaggaaaagggagaatgaagagttaaggagagggctagacgggtgggaggaagcaaagttgaggaaagaaagcagatgagtgggagggaagagccagggacagcccaggggatgggggccaggtgggaaaggaagtccaggccacaaggtggagaggagccccggactgtgctcctgctgatcgtcctgtagagccaggaggccgcagcaggaaagctggtgagtgtctcctgcttctgcctcctgctggctgggcaggcctggtctggggaagaaccaggtcctctgatcagggtggtccctgagtggtgctttgtgcccggtgccctctgctggcccaggcagtgcttattgagtgccctttatgacgtgccggggagcctcagggtacacagctgataccagggttggcctcacagtggcgcttggactcccaaacgcaaccccagtgagagtgcctgttttgctaatacccagaacacagacagactgttacctctgcatatcacgtgcaacattctgagagtttctgttctccactaattcatttaaaagaacaaaacgcggccgggcgcagtggcttacacatgtaatcccagcactttgggaggctgaggcggacggatcacgaagtcaggagttcgggaccatcctggccaacatggtgaaacctaaaaatactctactaaaaatacaaaaacttgctgggcatggtggcacacacctgtaatcccagctactcaggaagctgaggctggagaatcacttgaacccgggaggcagaggttgcagtaatccaagatcataccactgcactccagcctgggcgacagagcaagactctgtctcggaaaaacaaaacgctttttgtgactcacgaacttgatttcatgagtgggtttgaaaaccctgggctagtccaggcgcggtggctcacgcctgtaatcccagtactttgggaggctgaggcgggtggatcacttcaggagtttgagaccagcctggctaacatggtgaaaccccatctctactaaaaatacaaaaattagctgggtgtggtggcacatgcctgtaattccagctacttgggaggctgaggcaggagaattgcttgaacccgggacggggtggttgcagtgacctgagatcgcaccactgcactccagcctgggcggtaagagcgaaactgcgtctcaaaacaaaacaaaccaaaaaccctgggctaggcaactttcttggcagaaactactttggagctcgacaccagatggtggcagagttgtctggggagctgtgtcgagggccgtggccttgggagcagctccaacctcccatctgggctcagaaaccagtgtcagacattggttttattttaacctttgagatttgtgtggagcgggttttgccttcccctgttgcttagatggattatttagccatattttttgttaaataaggggaggtggtcattatccgtgatttcagacgtggaatcggcccggcgatagctgcattgtgccctttccggtggagccaggaggagtttggccgccacgctccatgcgcatagcatgtcatgcagctagccaagtgcattgttctgagtgctccaggataagtaccaacttacttagtgctccaggataagtaccaacttagtgctccaggataagtaccaacttacttagtgctccaggataagtaccaacttacttagtgctccaggataagtaccaacttacttagtgctccaggataagtaccaacttacttagtgctccaggataagtaccaacttacttagtgctccaggataagtaccaacttacttagtgctccaggataagtaccaacttacttgatcctcagagcaagcctaggcggtgggtactgttttgctcctgttttaccagtgaggaagcaggcacacagaggtgaagttgcccaaggtcacacagatggttgagggagagccggattggaatgaactctgtgctgttagccactgtgtgaggctggactgttccattccagcctttacggcctcttccaggccattccccagctgcacttggattctcaggccaggcaccggcggtctcctgtgagggtggagaggaagagggggctgcgtggctcggggaggtccaggagagatggcgggaggagtagagtttggggcctgcggtgccagaggacccccttacaagacgaaagactgggttctcaggctcctgaagcaaggagcaccttcaggggtctcctggtattcacccatcaaggcttgctcaggtggcatgcgtgtgtgcgtggcggctgcccccgggcccggaagcgcctgtggataccaaagcaagtggaaatgccagatggaaaagccccgtgttagtcaatgctgtagagttcagccagcctcgagtttgcaggtttacagagctgccttgcgcctggctgctgctgctgctgcattcctgcttctgcctccagctgtgaccacctcctgccactcctgctctcactgtgggttcctgctcactctgtctccaggacagactgccttccgggcagccttccctcctcaagcctcttggcctttgcaatcctcttacctgggtcactggtgggatctcatttgtggatcaagtcgcccccagtggagacaaatgtctgatggagtctggccaaggccctcctgagccttcactgggccctgcatgagaagcctgccaaggctgaggggccagggaaacggagacgaagccctcagagcaggccaagagggtgggaggtggggggcatttagagggttagatacagagcacccctttacaaataccagctactggcttttcgtattacatgttcattttagatacaacatactgcacacgctcccttaacgtgtgtttacgcgtgggtggtgtatccttccagacgtcttcctcacatctatacataatatgcatagataaaacatttaccaccaaaacccatagtgttatgtacatatttgtctggctgtgtaactttaaataacatacaaatgtatagaacagaagcttgccctctttctgaaatatctaacgtgggatttcaggctttctgatgagacctctgtagaggtcagtgttttgccaccagaggtccttcagcctccatctgttctcccacctacccacattctggcccctggcaattcacagggagtttaggaagtagacaccagggccctatttcctggagaccagcctggtggccgatgtcatagagtgcggtgggcctgggccggccctgctctgggcccgtgacctgcgtgtctgactcgggtccagctgttcttcctgccagagcctcttcctgtgaggcgggggtaacacaaccttctgtggtggctgtgggattaatccgtatggctgcattgtgagtaaagcctggtggaaatctctgtctccactgctttccttttcctgctgttcaccttggctccctcgacacttaatccccctccacatgtgtctggagcgggcagagcgggggcagttgatagaaagggggccgggtagtgccaaggctgttactttcccccactgcctcccttggctaacttgaagtctgaccctttataccagaactgtaagacagtgtgtcagaatggattcagttgcagagcaggaagcctggatcccagcgccggacggaaatgagaggtcgatggtgcaggctggtgtgggggttcctccaccgtcagggcccaggctccttctcaggtctcagtctcactcttcttagcacgaggtcaggtctcattccttggctgcgggagctccagccagcacacgttttaggaagaaggaggaaggaagaaggtaaagggtggatggcagctgcctcctcctctcttggaagctcacagagcgctgggtcacaattccctgggtagaactggatcacacaggcacccctgtcagcaaaagaggctggaaaaagtatttctgaagctgaatcaaattaagattcctgttactaagaagggagtgattgtatgggcgactacagggaccacggccatacacggtgcctggaagaccaagcttgtgacagtgacgaggatttggagagggcagggtgatggggagctttggggggagtgcattaggaaccctgacctggagaggggcagaatgaaacctgcgggcccctaaccctagtgggttgtttgagaaacctgtcctactgtggcagggggctgagtcttctcagggtcatgcatgaaaactgaaattcctgaaggccacacacagccccggaagtgctgactgacaagggcacatgccagtgatgcagttttcttttttgtcttcacttttgttgttccgccgtcttcaacacatggctcccagctcacagcaaatgctgccctggttcagctaccaggaagcaggagaggggaagggagggcaagcctcattctttatggaacaaaagcagtgggcagacagccttccctcacgttccactcactggaatgtggtctggctgccttccctgcaggaggtgggatgcaccctcagtgcagcagccctgccccagccaaaaacgtctcagcacagctgtaagaagaggaagatggctagagacaggcagccttccctgcaagggcaatgaggcaagcctgccaaaagcctcctttggaaatactgtttgattacttttcagagtttctatttaggaaaagggcaaaacctttcaggatcaggagtaggtgagcggcgatcaggcctcactcttcaccgagggccttccctgaggaggggcctgcaggacgctggcagcggaatggggctgtgtggctgctagattaggtcatggcagggagacagcctcttcctggttcttgctagaacaggcacacttggggccttgagctccagggagttcatggaagacatctgactaccctgagccccttgctggagggttctggggagtggcccacggccaccgtcacccatggccaccgtcacccacaggggccgtgaggacatccctggccagcatctaacacaaccacatgggatgccctaagcaactactgcccagccgagggctgcctgaatttctgactcacaaatggtgggcaatgtgaaacgggtattttaagctgctgagttctgcgggagtttgctgagcaacagtagaaaccagaactctcggatactgtgttctgtccttgaaacggtggaagattttatgtgaccagaatggaatgtttgaacaaatattttgagaatagaattttaaaacatttactcatcagcatccaagggtggggagcagtgtcatctaggagactggttctattatttacgtagatgttcttgaattaaaggatgggaatattttttccttccaaaactttttttcaattttatattctgtttttcaagtttttattatgaaaatattcaaactcacagggaagttgaaagactaatacaaagaagaaccatactctttccactgacatgatccaacgaggaatattttgccacacggcaaatatataccgtataattttctgtaccacttgatagaaaggtaaagaatgaatattgttttttaaataacttttttcgtatataagtaatatgtgcttatcgtgtaactacctaaaaacattgaaaaataaaaggaaaataaaattcatacataacc

SEQ ID NO: 458 - DNA, 34759 bp, Homo sapiens
  source 1..34759: mol_type = genomic DNA; note = NC_000019.10:7830218-7864976 EVI5L [organism=Homo sapiens] [GeneID=115704] [chromosome=19]
gtcagcgggtgaaatggcagcggcggagccggcggcggccgcggtcccggggggcggctgagggggccgggccggggctgcggggcgaacggcgcggctaggatccggcggctcagcccggggcggcgaggctcggcacggagatggcggcgcgctcggcgcaggtagggcggcgcgggccgggcctcccgggcgcctgctcaggccggcggctccgtgatgcggcccgcggggaaccggcaggaccgcaactcgggccgtcgtgccccggaacccgcgctgggagcctcggcatccccagcccgggaccttcggaggaccctggcccctgcccaccctcgttgccgatccctccggacccctccccaggagctcctgcaggatccccctcccccactccgtcccctccccatgaggaccccgcaggcccaggacccccgtccaccctttgcagtgaccctcaggactcctctccgggaaccccctcagggctccccatccccccactccgccgatcagcccctcagaagcgccccccaagcccaagaacccccgtccaccttctgccctgatctctcaggacccctcccttctggacaacacttgccaccccctccccgcaccccctcacttcacgtcctcctatcttgggcccagaactgcccccacctctccccaaggagaccagcctcagggcctacccgccccccatgctgaccccacaggacccctctctggcctctgtaagtcggatttcctacccctgcccacagccctcagctcagcctgctagcccatctcccaccccagctgccacatgcccaagggcacccctaaacaccactccccggcgtccacccagcacactgtggtagctccactgatcctgccccatctggatcctggctcctggatcctgaaaaatccacccatgctcaagacctcccgttggatattctgaaccaccccactccccatccagagccacccatctttctgaaaaccccaaacacacacacacacacacacacacacacacacacacacacacacacagtcacttagatcccccagcacacacagaaaaacttaagagctccaacatagaccccaggcatatctgcccctgcccccacccactcaacacttctgcacccctcctcagatcccacctgtccaggccctcccagagtccccgacagctcccccagctcaagcagagattccagagaccatgaggtgcctgccgcaccccaggaagccaacttgcccctccaccaaaccagcgcccacactggagccttggagggtgacagggccccagaatcccccagcacctacccctgtgggaacctgccccaggcctctgccaagttatccatccttccctgctgtgccctttcaaagggaaggacgctcactttctctcctacactagtgtcccgaaggaaccactgcccgccccctgatttatgccaccccctggcgggaagggagaggattcacagctcctggcttccgtcctgaagtctgcccccagcctcctgaccccatcacgcctactggcctcaaatgccagagccagcagggcggtccaggttgctcctcagagctggcccctgacagcccgagagttctttcacccacaactagtgtgtttggccaaaacaaaacagcttccttctatcttggcatttgagacctgggtcggggcctgccagaagcaggcagctctttgttaaggaatattttcagaagggaaaaatgtgctgaagaggctcgagtggaacatgaatgagttgtctgcttcgttttattccccctcggccgggatgtgattgagctagaggacccgtgtccctgtgtctttccgtcttttgtggctcttcccatccatcccgccgccctccccactcccagctctggcctcagggtccaacctgtaggttcctctgggcttctgtggtcagcggagggtggtttggaagggatcgcaggtggcttggccctggcacagggatgagacaagacaggagaggagatgctggcgcgacactgtggccaggactgcagggggcgaggagccgggccggtccagtcccgcgcagcctgggcactgtgcgtctggggtccttctgacaacataactgtgctcagaaaccctgagataaaaggcccaggcttccttgtggatattcactagcggattgtggaccatccaggaaaaagctcattgcggctcagtacctcaacttccccatcggaaactggggtgcggggagagcggctaaatttttagaacagaacttggaactgcaggaaggctagggtgtggccctgtgtgttcccccagtgccgtgtggaaggggacagcaaggtctcggaggggagtcctatgggctcctgtgaatcactggccacccaggtccctgcgagggtcttagttgacacttcattgaaaagtggccatcttcctagggctgagctgtattgcagggagccagctcgaatcagagctggaagaatggagatgagagatggtctgctgcaggacttgtggttatacacagggtcttcccaggaggaccacggggaacagggtgggcatgaggggctgtcggatagccatgctgaggccccacatagatctctgatgccccacatagacctctgacaccgggtaggaagaggtttgttctgtccacttgctgaaggaaggcgtggaggaaaagactcctgaaggtcacgtggtatctctcacgcacaggaaactaaactctacagcctccccagggtggaattttgtgcagagacagtggggtatgaaggcttcccaggatgactgtgaactctataggaaaccacgaggaggacttgtcagtgatacgaacgcagttttacccgagactgggctcgtggagctgcatctttgtttgagctttgagggggcagacggatgaggaggaatgtatatttcaatttcctcttgcagaatagagatgccagttgttacagggaagccctgggcctggagtcagatgttggggtgtgaaggaatgtaagatgtgtacaatgtggtccctgctctgcgtctaaagtcctctcactggcatgcggcggcccccgccatgtgctcagcaccatgccaagcaccattgacatattatctcatttaatcctccccaaaactcggaggaaccaggattgcagcacgcgcccttgccatcctggcctgaggcctgctgcggggagcatgagacagaattatgtacagcaggctgcaatgggagcccggaaaaaaagcctgatgcatccctggggtgttggggaaggcacagcagggatgacgtatggaccaggtcacaggcaggcgtggcagggaagggtgttccaggcagcagaagtgcttggacacacgcccaagaggcaggagcaagcgtggtgcgctcagggaggcgtgtccctgtacttcctttgataggcgtcttactacaagcccttgtgtccccagtgccatctgtacacttggcacacatggtggggggctccccagcaaaggggatccctagttgggagaacttggaaaggcagcaaagccgcccttcccagggaagactgcagcacacacatgctagcagcccgggcaatagaaggaaggaggtgagtttaggagaactaactcagctcatcagggtcagggagaactaactcaattcatcagggttagggaagagacttacccttttgagggagatttggaaggcctcattggcatgactcacctgcactttcattcatttctcagcatgccacgatatgcttgtgagagtgtttgattgaaatctgaggcccggcacggtggctcacgcctgtaatcccggcactttgggaggccgaggcgggtggatcacctgaggtcaggagttcgagaccagcctggccaacatggtgaaaccccgtctctattaaaaatacaaaaaaattagcagggtatggtggtgcacacctgtagccccagctcacttgaacctgggaggcagagcttgcagtgagccaagaacgcgccactgcatgccagcctgggcaacagagcgagactccatctcaaagaaataaatacaaattttaaaaatttttaaaaaaagaaaaatgagggttttgccagaagggaacctattataatagccaaaagtaatctggtcagatgacaagaaagaaaatttttttttaggtcagaaaggattctgcaggtcagaatggttcacttctcagattttagccaaaggtgtgtgctgctgttgctgctattgttatcaataaagattattctagttttactgtgtttactctttaaacaggatcaccacagaaagggagggcctgttgaagaggggaagtttatttatcccacaaatatgggatgcctactagactctgaagatccaatagtgggctagacagccccagcccctgccctagtagaacttttcatccagaagggaataaatatcacaggtcaggcttgtcctaagcacatgacaggtttaagctcattgattccttccaacaaaaactgtggggtagatactgtcattagccctgttttcagataatgaaactgaggcaggccaggtgcagtggctcacgcctataatcccagcactttgagaggccgagtcagggagataacttgaggccaggagtttgagaccaacctgggcaacatagtgagactctctctctgcaataataataataataataacaaaattagctggacatagtggcaagtgtctgtagtcccagctacttgggaggctgaggcaggagaatcacttgagctcaggagttggagcctgcagttggctatgattgtaccactatactgcagcctgggtgacaaaacaagaccctgtctctaaaaataaaataaaaataaaaataaacaaaaaaaattgaggcaaaatacatcatacccaaggttacaaagatagaaagtggtagaggaggccaggagcggtggctcacacctgtaatcccagtactttgggaggctgaggcgggtgcatcacctgaggtcaggagttcgagaccagcttggttaacacagtgaaaccccgtctctactaaaaatacaaaaattagcgaggtataatggcgggcatctgtaatcccagctactcaggaggctgaggcaggagaattgcttgaacccaggaggcaaaggctgcagtgagccaagatcgtgccactgcactccagcctgggtgacagaggtagactcggtttcaaagaaaaaagaataaaaagaaaagaaagaggtagaggaaggatttgaacccaggctgcaagctctgaagttctcacctggagccaagagatctgggataacaacctacattccaaggccagggatatggaaacttccagaaccatgtggaggagcagctagactgggcgcaagaagagatcaggcagggacctctgaattcaagccgctgttcttgttatccaaggggcagctcacctgtcagttgtccgcccacaccttgccaaggacgagaggacctaaggtgctaggttgggccatttccccagaggtcagagccagccaagacagcagcagtctgtcaggctagacaaatcggggtcacatggcatcttgggctttagattccgaaatgagtctgtgtccctggtaatcattagacatggaggaatcagaaatggggggtagggccgggcgtggtggctcacacctgtgatctcggtactttgggaggccgaggcgggaggatcacctgaggttaggagttcaagaccaacctggccaacatggcgataccctgtctctactaaaaatacaaaaattagccagatatggtggcacgcacctgtaatcccagctactcgggaggctgagggaggagaagtgcttgaacccaggaggcggaggttgcagtgagccaagatcgtgcaactgcactccagcctgggctacagagcaagactctgtctcagaaaagaaaaaaagaaggaaatggggggtaggggagtaagggaaacaacatggaaaggaaactcggggtcttcattgctgtctctgaaaatgccacagactgaaagatgcatcatatgtgctcgccctctctcaccgttgaaaaataatgactgttttcactgagtaacccctgcacttggggtttcacatacgtgtatcattcccaaagtaaaagaatacagacagagctgcagcacagcgggtggatttagggcaaaggctatacagtcagaaatccaagttcaaatccttcttcctcctcagcctagtcaagggactctctgtgccatatggcacttgtgtgttaaagccgtcgttggcttttctgcttacactgtacagaaatttctatttttatttttttcatttttttttttagacggagtctctcactctgtcatccaggctggagtgcagtggcgtaatttcagctcaccgcaacctctgcctcctgggttcagcctcaggagtagctgggattatagccatgcgccactacacctagctaattttgtatgtgtgtgtgtatttttaatagagacagggtttcaccatgttggccaggctggtctcgaactcctgacctcaagtgatctgccccccctcagcctcccacagtgctgggattacagacatgagccaccgcacccagcctttattattatttttaaaatagacttgggctgaggcaggaggatcccctgtggccaggagttcaagaccagcctgggcagcagagtgagacccctgtctcaaaaataaaataaaatggccagttgtggtggctcacgcctgtaatcccagcactttgggaggctgaggcgggcggatcacctgaggtcaggagttcaaaaccagcctggccaacatggtgaaaccccatctctactaaaaatacagaaattagccgggcgtggtggtgcgcacctgtaatcccagctacttgggaggctgaggcaggagaatcacttgaacctgggaggtggaggttgcagtgagccgagatcacaccactgcactccagcctgggcaacaggagtgaaactccttctcaaaaaataaaaaataaataaaataaaataagactattttgtagaacactttgagatttatggaacaattgagaagacgatacagagtttccatatgccccatacccagtctcctctatagttaatgtcttccattcatatgatacatttgttgtagttaatgggccagtattgatatattattattaactaaagtccacctttcattcagatttcctttgttttttcccagtaaccttcttccatcccaggatcccacatgacatttagtcgtcatgtctccctaacctcctctgggctgtgacagtttctcagactttccttgcttttcgtgaccttgacgtttttgtttgtttggtttggtttggtttttgttttttgttttttgagatggagtttcgctcttgttgcccagggtggagtgcaattgtggtgcagtctcggctcaccacaacctctgcctcctgggttcaagcgattctcctgcctcagcctcccaagtagctgggattgcaggcatgtgccaccacgcccggctaattttgtatttttagtagagacagggtttctccatgttggttaggctggtctcgaacccctgacctcaggcgatctgcctgcctcagcctcccgaagtgctgggattacaggtgtgagcccccatgcccggccaaccttgacggttttgaggaaggtggagtaggtgttgtgtagaatgtcctctaatactgatctgtctggtgtgtttattttttttttggttggtttttttttgttttgttttgttttgttttttgagacggagtctcgctctgtcacccaggctggagtgcagtcgtgcaatctcggctcactgcaacttccgcctcctgggttcatgccattcccctgcctcagcctcctgagtagctcagattacaggcatgtgccaccacgcccagcaaatttttttgtatctttagtagagacagggtttcatcatgttggccaggctggtctcaaactcctgacctcaagtgatccgccggccttggcctcccaaagtgctgggattacaggtgtcagccaccatgcccagccactctggtgtttctcatggttagactggggtcttggggaggaagaccacaggggtgaagggtcctttctgtcacatcctatcaagggtacgtgttagccacgtaacttatcactgttgatgttgaccttgatcacctgcctaagcgacatggaaagtttcatcttcatttattcaacaaacgtttgtcgagcatgtactgaatgccagatagtgcattaggggcttggaatagagaattaagaagagaggctcttgtcctcaaatcgtgcatgaccctagggcaggcaggcaggcaggtttagaaataattgccatagaatgtgcattgggcttgggtgtaggcagaggggtggatgttttcagggagagagagggggaaaagcgagccaggatgctggaagaagggaggttgacagagaagttttcacagaaagaatggccaaaccggccaggcacagtcccagcactttgaggagccgaggcgggaagattacttgaacccaggaggtcaagtctgcagtgaacagtgagctatgatcataccagtgcactccagcctgggagacagagcaaaaccctgtctctaaaaagaaaaaaaaaaaaatccttggccaggcacggtggctcacgcctgtaatctcagaactttgggaggccaatgcgggcagatcacaaggtcaggagatcaagaccatcctgggtaacacagtgaaaccccatctctactaaaaaatacaaaaaattagccaggcgtggcggtgggtgcctgtagtcccagctactcaggaggctgaggcaggagaatggcgtgaacccaggaggcggagcttgcagtgagccgagatcgcgccactgcactccagcctgggcgacagagcaagactccatccatctaaaaaaaaaaaatccaaaccgggtcttggagaatgcccttccagtcagagggaacagagtatgcacagacactggcagacatcaggagacccatgtgcctggaggactgagtgtgccaagcagggatgcagaaagaggcgaggctgggaagggcatgcacgtcttgcaaagacatctgggctccatctcaccattgggagctgctaaagggtcttaggcaggcaatgacgtggcaagagctgcagttctgtatggttctggtggccccatggacagagcatcagaaaggacagaaagttcaatggacgtggcaggcgccatcaagacagcagctttggtggggcacggtggctcacacctgtgatcccagcactctgggaggctgaggcaggagcatcacttgaagccaggagttcaagagcagcctgggcaacatagtgagaccccaagtctccaaaattagaaaaattggcaaggcatggtggcgaatatctgtggtcccagatactcaggaggctgaggtgggaggatcacttgaggccaggatctcgcaccactgcactccagcctgggaaacagagcaagaccttgtctctaaaagcaacaacaacaacaaaaagacagcagcttccagcctggagagcagaggccagttgggagtgaggtgtgggatgtgggtggtagacttggctgagctctagaacatgagaagggaggaggggaacacccaggcctggccagagtgggtgggtggaggtggcaggtggcaccggggacccagatagatgcacccgcagtaggacaaggggcctgcttctgtcaggaaagcattgaatttgaagagcatctccgcatgaggggccagaagggtctttctaaaatgcaaacctaggccacgggcagtggctcacgcctgtaatcccagcactttgagagacccagacgagtgaatcacttgaggtcaggagttcaagacgagcctggccaacatggcgaaaccctgtctctactaaaaatacaaaattagccaggcatggcggcacatgcctataatcccagctactcgggaggctgaggcaggagaattgcttgaacccgggaggtggaggttgctgtgagccaagatcatgccattgcactccagcctgggcaacaagagcaaaactccatctcaaaaaaaaagaatcaccccaattaaagcttacagtttggtggcatttattccaactgtgttgtgcaaccatcaccactatctaattctggaacatttctatcaccccaaaaagaaacctacacccataagcagtttctccccattcctccctccccctggcccctggtgaccacaaatccactttctgtctctatggattgcctattctggacattccgtataaagggagtcacacagtgtgtggcctttggtgtctggcatctctcactgagcaccttgttttcaaggttcatccatgctgtggcctgtctcggtgcttcactccttttcatggctaagtaatattccactgtctgggtggaccatgttttgttgatccattcacccgttgatggacatgtggattgtttctgctttttggctgttgtgaacaatgctgctgtgaacagatgtttgccgttctcttgcgttgagccctacgagtggatttgccaggtggcgtggtgacagtgtgtttaagtctttgaggaaccgcctgactgttctccatcctaccgtattgtttactgcaagcatttatctcaatctgtgaaggagggtctgggtgattgtttcttggtctctgccccggacactccaagagggcacaggtgattcctgcctctgcgggggaaacacagaacatggaatggtgggtgggctgggggctgatggagctgttctggcaacttgggcaactttggccagttcttgagagaaacgaaaagctggtgacatacatttggtcatttaagccccaagaatgagatccccaagggcatcaagatcaaggccaaggagggacccagggaggaagagatgccacgtgggagaatgagaagtcccggccagagaggcaggaaggaagccaggagcccagtcctcatcagccaggtgggagggggcttagggaaggaggaagcatgcgcggcagtgcccccgagagggaaagccaaacggaagtcgaagatgaccagcattccagcactttccgtccccacgccccccacaacccccaaacacagcccctttccagtgctctggcctggctcagcttcctaagctgtaggtggccctgtggaggtgtggcttgagtgggtgctggcaggggcagggtccaggaccccccttcagatggctgaggagcagttgagggtgaagcattgaaattaaggacacggagaggctgggaccccagacccagaggccagtgggtgggttgccaaggcctgtgcccatccagcatagggagatggagatggggcctcccctgcctcgctccctaccatgtctcctgcctagacagtggccggccctcaggtggccctcagtcagcaccaggaaggagtgattgagccagtgagggtcatggcacagtgggaggggtgcagggtcgcccacagaatcaggacagcagcccacctccaccccaaacctgctctgttcccagggggtgagcgctgctcggtgcaggaagtgtgtgagcgcgtgtgtgtagatgggtgggaatgaatgtgtgtgtgcctgagtgcgggtgcaagagtgtgtgtcaatgggtatgttttgtgttgagaagtgtgaaagagtatgtgtgtatgcctgagtgtgtgaatgtatgtcatgtgcatgtgtatgaggtgtgtactgtgtgtgtgaatgtgcatgggtgtgtgtgttgtgtgtgcatgtatatgtgtgtgtgtgaatatgcataggtgtgtgtgcatcaagtgtgtgcatgtgtacatgtgtatgaatgtgcatgggtatgtatccagtgtgtgcgtgtgtgagaatgtatgaatgtatgtatcaagtgtgtgcatgtgtgtgtgaatgtgtatcaagtgcgtgcatgtgtgtgcatgtctgtgagaatgtgagtgtgtgtgtatcaagtgtgtgcatgtgtgtgcatgtctgtgagaatgtgtgaatgtgtgtgtatcaagtgtgtgcatgtgtgtggggatgtgtgaaagtgtgtgtatcaagtgtgtgcatgtctgtgaattggggtgtatcaagtgtgtgtatgtgtgtgaattgtgtgtgtgcatgtatcaagcatgtgtgaatgtgcatgggtgtgtatcaagtgtgtgcgtgtgtgaaaatatgtgaatgtgggtgtttatgtatcaagtgtgtgcatggatgtgtgtgcaaattgtgtatcaagtgtgtggatgtgcacgagtatgtgtgtattgtgtgcatgtgtgtgaaggtactgggtgtgtgtgtatatgagtgtgcgtgcacaaatatgcataagcatgtgtatatcgagtgtgcacatgtgtgtgtgaaggtatataggtgtgtgtatctgagtgtgtccatgtgtatgtgtgaatgtgcatgggtatgtgtgtattgagtgtgtgcatgtgtgtgtgaaggtaccgggtgtgcgtgtatccgaatgtgtgcatatgtgtaaacgtgtgactatggatgagcacgtgtgttgagtgtgtgcatgtgtgtataggtgtgtgagcgtgtgtgtgagagaataggcatggctgtgtgtcgagtatgtgcatgtgtgtgtataggtgtgtgagtgtgtgagaataggcatgggtgtgtgtgtcatgtgcatgtgtgtgtataggtgtgtgagcgaataggcatgggtgtgtgtgttgagtatgtgcatgtgtgtgtataggggtgtgtgtgtgagaataagcatgggtgtgtgtcgagtgtgtgcatgtgtgtataggtgtgtgtgagaataggcatgggtgtgtgtgtcatgtgtgcatgtgtgtgagagaataggcatgggtgtgttgagtgtgcatgtgtgtgtataggtgtgtgagtgtgagaataggcatgggtgtgtcgagtgtgtgcataggtgtgtgagtgtgagaataggcatgggtgtgtcgagagtgtgtgtgtatgggtgtgtgagtgtgtgtgagaataggcatgggtgtgtcaagtgtgcatgtgtataggtgtatgagtgtgtgtgagaataggcatgggtgtgtcgagtgtgtgcatgtgtgtataggtatgtgagtgtgagaataggcatgggtgtgtgtcaagtgtgtgtgtataggtgtgtgtgaataggcatgagggtgtgtgtcgagtgtgtgcatgtgtgtgtataggtgtatgagtgtgtgtgtgtgagaataggcatgggtgtgtgtatccaagtgtttgcatgtgtatgtgtgagagtttgtatgtgagtgggggtgggtgtgaatgtgtgtacatgcgtgagggagtggggtggctgtgaagagtgtgagagtgcatgtgtgttgtgcgtgcacacacgcttcaggaggatggtttccactgagagagtctggggatgagtggagagaaagttccggtgggatcagaaggttcctgcctctcagactgcaagtttcagccctgtgtatttaatacatttcacttcctgtatgaaatacacacacattcgtgataaatagctgaacaacctctgctggtggacggctcccgggtttgggggatttttaaaatcagaaactgaggctcggctgggcgcggtggctcacatctgtaatcccagcactttgggaggccgaggcagatggattccgaggtcaggagttcgagaccagcctgaccaacatggtgaaaccccgtctctactaaaaatacaaaaattagctgggcgtggtggcacgcacctgtaatcaagcaggagaatcgcgtgaacccgggaggtagaggttgcagtgagccaagattacgccattgcactccagcctgggcaacagagcgagactccgtctcaaaaaaaaaaaaaaaaaaagaaagaaagaaaagaaaccgaggctcgggcagagattgggtggggctgatgccctgagcttgggtttctttggttctgaagctctcactgctccccaactccatctgtggttctgaggctccagcctcacctccaccacctcctccccattctcccagctctgaagctaccctcccagcccctccctgcccagagaggtccttctgatcagcacttcttgtccacagcccccgtctctgtccgggcagactttgactctgtgggaggccccaaagtggcccccactgtccctgcctcgggaatgattaactcctgattaggtggtgcccagcagcttggtctttagggcaggtggccctggcccacttggcaatgagagttccttccactccccaaaatccaaaaccctcagcacccggcagactaggggaacgcttgagggcccaaggtagaaccagtagccttggggagccacagaggcctggagaaagagggttctgggtccccatacagtgaaaaaagaatggcgcacctcccccaaccctattccaggaggactggggtggccagggtcaagtccatccaacctgtaggccctcaggggttggttgggggctgagtttgggctgtgggaaggtgcccagtgacccaacggtagtcaggcaggtatagagtggtctgctatggtcccgccaatgtccccctgctgcctggggatccagatatccccactccaaggacccagcgaggccctctctgtaggtggagctgtcagccaggtcaggtggggtcaagtggcacacggcagactcctgctacagagcgtgccgggcagtgggcgggcatgaggagccgtgcaaataaggaggcaggaggcagggtttccttcctgccatcaggaccctaggtatccccatcttctcagacgctggaggtgagcctgggctcaccaggaagaagcatgaaggaacaccatccccagccgctgcctccactcccatagccgtccctttcctctagggccccctgctaggggtcccctggccatcagtccccacacaggccacagcagaacccaggagccctggctccaggatggacagtgatagccgatgtccgtggggccatcactgagtgtcaggctctgttctgaccaggttatgtgcagtcatgtgctcagtttccacagccacccttgaggctaggtcctgtatgatctcagtgtacggaggctcagagacaccaagtgactggcccaaggtcacacagctggttgaggggagccatgcttcagacgcagatccatttgagcccagtacctttgtttttgacatggcattgatctgcctccaccagggtggcagaaggcgagaggccagtgtccttgaagcccccagaagggtcgggccagatgacacggcaaaaagataggagagatgtgcctgggactcacctggcacgtggcaggccaagatctggatacggatcggagcccacagctctggctctgtgtctgccagggcacagattcccagcactctgccacgtccctggcttctcaacccaaggggagtcgactcttctggccattggcagcgccagacaattaacagtcgaaagtaattgctcttggccgtgccagcagcccactttggttgatgagatggggaagtcagacactgatatggggctcccagggcaggccgtggcggggacggggacaaagctattaggaagggccagaaaagcagggggctcctgcaccccgaggtcccagcagggtccatggagccccgagtgacagggagcctctgctccgggccctgctccagcctcaggggtgtcgagttgagccttggccttcatgcccagggacagcaggacggctcacatcctggcaacagtcctcccatctccatccagacatccggcctgatgacacaggcagggatcccaatcgccagggtctcgaacagaaggggcagcatggctgtcagctgggctggggcgcatggggatgaggggtgcacggacgggggtggaccagaggcaggaagcccagggtgaggaaatgtcccgagggtgggcaggcaggatggagtgggctcccacccaatgccgaccacgcatgtctctggcccccagacagagctgtgaaccaaccccgctcacggctaacaagcccacccaccatggcgagccccactctgagccccgactcctcatcccaggaggccctgtcggcccccacctgctccccaacctctgactccgagaacctcagccccgatgagctggagctgctggccaagctcgaagagcagaaccggtgagttgggggctgggggatggggtgaaatcttggggtgcagtctgggcccccacaggagttcccaggtgccctcacattcagagccaggcccagtgtgtgcaatgtgacagccacctccagatgctggatgagggacagacacctcctttcatcctcccaaccctggctgaatatatgtgtccccaccctgttcagatgagactgaaggtttgagaggtcaagtgaatctgtgaatccgccgcggttaatggagccaggactggaggaagagtcgattcgggccttcctgctttcttcctctgaccctacccccatttaaaatgcaggttttaggctggacgtggtggctcacaccaccgaacactttgggaggccgaggcagacggatcacttgaggtcaggtgtttgagaccagcctggccaacatggtgaaatcctgtctctactaaaaacacaaaaattagctgggcatggtggtgggtgcctgtaatctcagctacttgggagcctgaggcaggagaatcacttgaacccgggaggcggacgctgcagtgagccaagatcacgccactgcactccagtctgggcaacaagagcaaaactccgtctcaaaaaaaagggggcgctgagggcagtggctcaagcctgtaatcccagcagtttaggaggctgaggcaggtggatcacctgaggtcaggagttcgagaccagcccgaccaacatggtgaaaccccatatttactacaaatataaagttagccaggtgtggtggcatgcacctgtaatcccagctactcaggaggctgaagcaggagaattgcttgaaccaggaggcagaggttgcagtgagctgagatcacaccactgcactccagcctgggcgacagagcaagactccatctcaaagaagaagaaaaaaaaaagaacaagagggacctaatccctggtgtcctctaagacccccaggagggggaggatgggctgggctcgccaaggatccctgtccccagggagtcactggttcccctctgtcggcccttcctgcccaggctcctggaggccgactccaagtccatgcgctccatgaatggctcgcggcggaacagtggctcctcgctagtgtccagctcctcggcctcctccaacctgagccacctggaggaggacacgtggatcctgtggggccggatcgccaacgagtgggaggagtggcggcgcaggaaggagaagctgctcaaggtggggggcggccaggcaggcagggctgggccgacggcgtgggcaggtggtgcggtcactcagccaccaggcagcgccagggtctgcggggccccagcctgggcacagcggcagcagtggagatgtgcaggcactttcagggtgtcctgccagagcacagggacaggagagagtgagtcagggtggtgctggacaggccctgcaccctcgagtgcccatgtgcttgctgccctgtagtgcccatgaaggatgggggtgtggtggctcacgcctggaatctcagcactttgggcggccaaggtgggaggatcgcttgaggccaggagttcgaggccagcctgggcaacgtaatgagactccgactctataaaaagtttaaaaattagccaggtaggccgggcgcagtggctcacgcctgtaatcccagttcgttggaaggtcgaggcaggcagatcacctaaggtcaggagttcaagaccagcctggccaacatggcgaaactccgactctactaaaaatacaaaaattagctgggcgtggtggcgtgcacctgtaatcccagctacttgggaggctgaggcaggagaatcacttgaacctgggaggcaagaggtagcagtgagccaagatcacgccactgcactccggcgtgggcaacagagtgagactccatctcaaaaaaaaaaaaagtttaaaaattagccaggcgtggtggtgcacaactgtagtcccagctactcaggaagctgaggcaggaggatcgcttgagcccaggagttcaaggctgcagggagctatgatcgcaccactgcactccagcctgggtgacagagggagaccctgtctctgaaaaaagggggtaaaaaaaggattggggaccatgagttctgtgccatgcttgaggcctggatgagccacgcctgaggagctgggctgggtggccacggggaggctgcgctgggaccgagtccagcccccgcttcccgctcccgtggccaggagctgatccgcaagggcatcccccaccacttccgggccatcgtgtggcagcttctgtgcagcgccacggacatgcccgtcaagaaccagtactccgagctgctcaagatgtcctcgccgtgcgagaagctgatccgcagggacatcgcccgcacctacccggaacatgagttcttcaagggccaggacagcctgggccaggaggtcctcttcaacgtcatgaaggtgaggcccagggctccccgctccctcggtcccaaaggaaggagaagttccccagttcaccggctgtgctggacggcgggaccctgctctcaggacttgttcccttctaggcatactcgctggtagaccgggaggtgggctactgccagggaagcgccttcatcgtgggcctgctcctcatgcaggtaggtggctggggggtggctgggctcctgccagacaacagcccaccctgggctcggcccccaagagatggacagaagtggcgtgtcctccacccagcgtcttgctaggggtagatcctccttctccatccacacccgtgacctctgccaatcgccaggccaaggcccagtgagtggcacctgtctggttgggtcctgtctgctgtaccatccaggacagagaccgggtttggagggataggctgtctctctctgccacatctcagggttggacaggaacctcaggctggggacttaagccatccagcgtggtgtttatggggcttgggggtctcctccagagaaatcgggaggctgacagggagagaggacgcagctgggacaggaggtatcctaaccagggggatgctggcagtggccagccctgggttcaggtccagctcccctgtttcctgccgagtggcccttggcaggtgacctcagcctcaggtcttccatcagtaaaacagcttgtgaggacacagggaccaacagtgtgtcatgagagtctagggagccaggtaccgacatggacatgggcccctgtaccccagggccctgatgagcagcgagatgcccctccccgctgcgctgccctgagcccccccacctgcccgtcccccctagatgcctgaggaggaggccttctgtgtgttcgtgcggctgatgcaggagtaccggctgcgggagctcttcaaacccagcatggccgagctcgggctctgcatctatcagttcgagtacatgctgcaggtgagcagggccgcaggagagcagggctgcaggagggcagggccacaggtgggcagggccgcaagggagcaggatcgcagaagggcagggctggcaccctagaccatacccgggcacctcttggactgaaaattccaagcctgtgaaatcacacctggacgttccaactccaaaaggcactcctctttccatgcagcactgccctgaaggatgcttggaggaacaggagagccaccactgaaggggggctcccagggctgctgaggcagaggggtggggcaggctcacatcggacacagccacagccacctccctgtctgctccagagtgtggtggaaggagggagtgttgtctgcctgcctgattactggagagccgcagacgtctgtttataaatagcagcccccgcagggcctgctcccggctggcaggcagagccgccaaggccgtttgcgaacatacacacacccgcatgcatacacacacacgcagacacacacacacacaccggcccgcctcagctgccatggcaggtggggctgtgcagtcatccctggatgtgacagccccactccctgggcctggatcatggacggtgctgtagccttagggggcctggtagtgccacaagcaggaggcctgggctgcagagaaggcaccaccccacctcaggctgggtagcagagccctcccacagccaagcttgcaaactcagggcgcagagagcccctggcgctgggaggaagcccgggatcctaacgccttctccggcctcagtttccccagccgtctgccactttctggctgtctagagttcaggccaatccaacacagcttgcacaaagctttatgctggggtccaagggaggtacagtggctggcaggtcacgtaacaaggtggggggggggctccccccagggccagaggctgccacttgcccatgctccacctctgggtctcagggtgtctgtggggagtgacccaactcccccagcctcagacacaccctctcaggctgtcgtgaggaccccatgagctgccacgggcgcatcacctacccagggtgggcccccaacacaggcggctacagatcttgccatccctgcctgtcccccaccccgtgctactcaaagctcgggggtgcttcggcctccctcagacagagtgctgagggagcaccaggaagggagcctcaggctgcccagcgcaggtccaggaaggctccctggaggcggggacactgaggcccagcaccccccggtgggagggcgtccccctcactgtgcccacccggcctcccacccctgcaggagcagctcccagacctcaacacccacttccgttcccaaagcttccacacatccatgtatgcctcgtcctggttcctcacactgttcctgaccaccttcccactccccgtcgccacccgggtctttgacatcttcatgtatgaggtgaggaccgatggtgcctggggagggaagagagccccttgggggtggttggaacaggagcctccctgccctccacctcccactgcctttgccgcctttgcaggggctggagatcgtgttccgagtgggcctcgccctgctgcaggtgaaccaggcagagctgatgcagctggacatggaggggatgtcccaggtgggccgggagggccagggccggtggggctgcccccaatcaggggcttcgagtcacaggatgccctcacaagtgacagagagggcccggcttcgagggtggaaggtggtgtgcctgacatccctgatctgttcccatccactctgttcccctgaggtctccctaagggaccagaggaccccctaggctctgccagacacagtcaggggccagcagcctggccgcagggagacaggaggcccaggctgagccctgggagccccactgcccacctcctgcccccaaccccgcagatgccccaaagcctgatggcagatcatgactgactgaccatgagggcatccccaccctgccgcccagcctggtgagggcacaggagggagtttgggggtctaggcaacctcacgccttgccccgccccagcccggcctgcctggaggccctgctgctggccagcctgcctcccaccgctacttctctgctgtgcgggcccctgccccctccccgcgtcctccagctggtgcttcagggaagaatgcacaaaggccacggttgtgtccgtgaacatgggcaggcattgtccacagctaccagagggggccagctgggccgggtgcaggagctgtgtcccccctgggcttaccttaaccctttgcacaggcccgaggcccccggcatacccatcctccttcccccacgaaggtcccctctgtcagaccccccgaccctcagccttcactcccaggagagcctccttggcctgcttttctttttttcttttacctttttctttttttttttaagtcggagttgctctgtggcccaggctggagtacagtggtgcagtcctagctcactgcagcctccacctcctgggctgaagcgatcctcccgcctcagcctcctgagtagctggaaccagaggtgtacatcaccatgtccagctaatttttttttttcagaaatggggtctcactatgttgcccacactggtctcaaactcctgggctcaagctatttatttctcccacctcaggcttttaaatcattgggattatatgaatgagccaccacatccagcatctgccagcttttcttctggaaactaaggctttggctgcaggcagtcccccattccctcccctcacgctcagtctttccattgctccacaaacactgaggacacggcgttgaggacatggcgacaccccgggcagacccgttcctgcccccctccagggcaacagggctcgggcggcccccggtggtcagggcctgcatgttggtgaccaggtgaccggctgtgtccccacagtacttccagagagtgatcccccaccagttcgacagctgcccggacaagctggtcctcaaagcctaccaggtcaagtacaaccccaagaagatgaagaggtcggtgcctgctgggcaaccagggtactggtaagaaggggggacccccgagggcatgacagtaaccacggggccctcccgatctgcaggctggagaaggagtacgcagccatgaagagcaaggagatggaggagcagatcgagatcaaagtgagtccaggggcccaggggcggggacagggatgggaggcctttgggggctgccctccgtactctaaagatcggccgctagggggcgggccttcccagcgcacaggcggacccggcggtccttggcggacaggcctccgcccacctgcgccgtccttcacctgttaggccagctgtgagcgcctcccccgcctgacgccgcggtaaccaagacagtcaaggtccctgccccgctgggccgcccagcgtcatggggaagcaatcaataaaccactgaactagagtgcggactctaaatgctctggacaaggatgtgcacgcggtgggcaaggctgacttgggcagaggctccgggcccagggtgtcgagggctaaaggcccagggcagcagcgtgccttgggggctggaggaattccaagaaggttgcagtggaggaccccgcaaggggaccgccctctggggaaagatggagcacgcagggcccagacaccagggtgtgtagggcagggtgtgggcactcacccggggcccctggttcctggggcaactggcccaccagccctgccaggtcagggggtttcctgagtgtgcaaagcttctctctccttccttgcgcattcttccctttacacgtgattttagttatttactcaacaagcatttattgccgggcgcgatggctcatgcatgtaatcccagcactttgggaggcggaggcaggtggatcacttgaggtcaggagttcgagaccagcctggctaatgcagtgaaaccccgtctctattaaaaatacaaaaattagctgggtgtggtagcacacacctgtaatcctggctactcgggaggctgaggcaggaaaatcacttgaacccgggaggcggaggttacagtgaggcaagattgtaccgttgcactccagcctgggcgacagagtgagactgtgtctcaaaaaaaaaaaaaaaagaaaagaaaagaaaaaaaacatttattgagcacctgctgtgtgccaaagtcacagctgagactgagggcgcaccagtgataggaagggacacagacacaaacccaacacagcctggctccatgctcttcaggggcagagccgcacagtggctaacactggagtccaacagacaaggattcaattccagctccagcggcacagtggctcacacctgtaatcccaacactttgagaggctgaggtgggagggtggcttgaggccaggagttggagaccagtctgggcaacatagcaataccccgtctttacaaaaatatagaaataaatacaaaaggtgtgcccagctcctgcaaggatggctgtgcttggtgctgtgatgggttgaagccagagagatgatagggaaacccaggggccagggatcagggctccagattgctatgaggaccagagacctgaaatagctctgacccagctgaactgagggactagggcaatgccctgccccactctgactcagtttccccacatgacatgcatcaatgactgtcaagtctgcggttctgtctgactgcatttgcttcctgggaatgttctaggtgtttccatcaccttttctccccagaagaaacccaggaaatattctgtgtgacctgcagtgtggcagggccctcactcacctgccaatccaaacaatttctgtaccaccttagtatcaagcaagggggcacaggtacagtcgagattcaactcgtttgcaaacctcacctgctccccagagtgtcctgggggaacctaaagtgcaaatatctttttctttttttttttttttttttggagatggagtcttgctctgtcacccaggctgcagtgcagtgaggtgatctcggcttactgcaacccctgctcccgggttcaagtgattctcctgcctcagcctcccctgtagctgggattacaggcatgcaccaccacgcctggctaatctttgtgtttttagtagaggctggtctcgaactcctgacctcaggtgatttgcctgcctcggcctcccaaagtgctgggattacaggcgtgagccactacacctggcctaaaaccgcaaatatctagccaaaatccatcagcacagaatggaaggcaggagcaagggagacgtcttcgaaaccccagccagggaacagagaaaaccactggggacaggttgctctcagcaggtcatgggaatgtagttgtcgagaaaggatgcatgatcagcacgctggacccagactcaaagaggagcctgcccccggaattgaacccgggtgcttggggcaaagcagcgaggggtgggtggtggctgctcgacagctgcttcccccactgattcccgcacaacccttggcagactgacccacgtgtgggaaggagtcttctgagggggcgtgggtactgactggcccccaaacacacacacagccacgaaggcactgacgttatttttactgaacccaggtttgttttaaaactttatttttttgtaatcaagccagtctgaacaggaattggccctgttttctgaaatcgctgacccagaacgtaagatgctggctgtgccctgcccggaaaagtggcctggccctaaggggactgaccccggcagtgggtaaatgaggggtgcatgtagacaggcgtggggggcgggctatgacgtgatctccccccacccccatagagacttcggacggagaaccggctcctgaaacagcggattgaaaccctagagaaggtgaggggcgtggccactgtgaggacatggtcgccatggggtgtgacccaccatgcggggcatggccgctaacctggggtggactcctccaagtcttctcctctctggaggactaagcagccctaccttcctgccccaggacccgacctgaacccgatttggagtgccctgcaactgggggcgactcgtatggtgattaatcctggagtgggggcgagttacaacccagtggcctgcagccacgggaatccatttgtgttctgtgccctccccggctgcacagacggggaggggtgaggaggagggagaactgccactttgatggacgagccccgtaattgggccacaagccaccccaccctgtaatttggaagtcttgccctcaaaagaaaggaaaggaaacccagtggaggagaagcgtggcgccatggtggggagccacagcccggactctgctccccaacatgctaaagatgggggtggaattgggggctcactgagccccagccccgggagcccccaattcctgctcctcactcgtcctcacttgaccctccactggccacaggaagtgggttggcagccggatttggttgccctcaccccaaagccttgttctgccttaaaattacaacgcaccccctcctctcccactctccaggaggtccgcacgaagccaaaagtccccctgccccccacagtttttccagccagcagcggcccggctgaccctggagggtgggacagtgggtttcccagccctgcggcctcccccacagccgcgggcacccccgacctccccgctcacaccgaacccctctccaggacggagctggctctagctttggtcttcctccgggtcctctcctgctggttctctggtcttccctcctctctcccccgcttctagagatagtccactgcgttagtgacaagtggttcttgtctgtctcccctctcctgtccccgcgccttccgctctgcctcctccccctgtcgctgggaacccccttcgccgggtaggagagcgctgctctggctgataggttaatccaggtactgtagctttttatcccctctccggattccttcctggccccttccctgcaccctgcacatgacagccagtaaccgcctcttccctgccattctgcgggcaggcctggcgccatgcatggagcagctggggaccgcttctgggggacacagaggcttcccgggggggcggggcatgtgaagtggggagaagggtgtgtgtggaggggctgtgagtgcgtttgggtgtgaatgtccacatgcatgtacagaaagcttcctccgggcgacacagggtggggacccaggagggctggggaacctaaaaccatattcacataaggccctggtgtgtgcagtgctgcggtcacacacacacacaacacatgcacacacacacacgcacacacacgcccggccctcacgctgctgctctctgctcctacctgcaatgcctgctaccaccttctctagctcacctgctcctgctgccacctcatcttgaatggctttatctggaagctgccacccgccacctggtggctttgagcctggaatggggggcccaagttgggtaggggacaaagatgaggtgggggaaaaaagggggtcttagctccaggcaggtggaggccccagagcccaggactagagaagatgccgctgggagaggtgaatgccctggggagcccagccctctcctgccggggcctcagctgtccccagatcctcaccctcaccggcagagtctggcatgaataggcacaggtggcctcgctgtgcccctggataaggatcccaactggggcagagactgagagccagagtggggaaggagatggagctttccaagcccagggctagctctgttcctcccgggctcctccaggtgtcctattcctgcctgtcacccacccacgtccccaggcccagtgggacgctcatcccaggctctgagtacgggaggcccccacctcacttccccccacctccactctctgggcctccccctgtggcgggaggcagggccttgggtgggagccgagggtcacggcctccccctgccccctgtcctcgctgttctcaggggcaagtgacacgggcgcaggaggcggaggagaactacgtcatcaagcgggagctggcggtggtgcggcagcagtgcagctcggcggccgaggacctgcagaaggcacagagcaccatccggcagctacaggagcagcaggtaggggcgggtgtgcggggctgctgggcggggccatgacccgcgcccccgcccccgcccaacggttttctttcagggctcataatctgccccgcctcagcacctggccctcctgttcctttctggggtaaggggaacccagagacaagcgcagattctcccccagcagctccacattctgagacatcctgatatccatttcttgccacctcatagtgtgtctgcagtatctgacttcccaacccccagcctcagcacggaggcctctgaagaccgggctgtccctgcagggtttcctctgtgtcacaggcagcagacagggctgtgactccttacggaggctcttgcctgtccccagggtctgaaggattgttaggtgtccctggggggccagccatggagaatgggagcagggcagtccgggactgtttggggagctctgagccagcagggtggggctgagggggcaccttgagtgtcttgagggccatgaactttgggtcccatgatgggcaggcccatgagtggggccccaccccaagattttcttctcctgaaagcttttagaacttaactgcgacctggtgcagtggctcacgccttaatctcagcactttgggaggctgaggcaggtggatcacctgaggttaggagttcgagaccagcctggccaacatgatgaagccccatctctaataaaaatacaaaaataagctgggtatggtggtgcgcacctgtagtcccagctactcaggaggctgaggcaggagaatcacttgaacccgggaggtggaggttgcagtgagccaagatggcaccaccgcactccagcctgggtgacagagcaagactccatctcaaaaaaaaaaaaaaaaaaaacttaactgcagctgcactcagcagttggccttcctgatcgcagggacccccagtggctgcagtcctaagccctgcaggccacagggacacatgccctggaggggccgggagcgacgctgtaggtcccgctgccatcctggcctgacccagcagggcctggcagtggggtgtaggttggagaaaccatggagtgcttgagaaagaagagccatccaatacagaggtgccccctccgcccccaggcccagagactgtggctcaagccttggcccagggattctagcggatccactgctcctggggagaaggagagcttcactgtttctcacttgtccccatgaaccacatccgtatgatgctggcgttgtggccctcagagtctgtgagcactcttgtcccaccttgctctgaggcagcatggacattagggaaactgaggctgggctcatcccacccactgcatgaggccgcctttcaggctcgttagagagactccaccagccacccctgagctccaaccttggggggatgcagagatcggggaggcccaaggccacctcctcaggcccaaagggaggccactgcaggcaagatgaggtggcccagaggagccacatggggcctggaggccatctgggccgaggcagagccaccgtcacacgtggatctcagagacccacaggaagaggatggtggctgggagggctgaggcagtcccccagagaactgtcctgccaggccacaaggtcagtgagagggagcccggctcccaccccagggaccaggtgtcctttttcaggtccaggtggcagtgtccatcactccaggggcccccactggggaacttctgagaagccagggcatggagcaagagggtgatacccacaaactctttcctcatccttccctgatttgaaatggagggtgggatgcagaggagagaggtggaaagacaggtgcacagccccaggcctctcccccaccccctgcctcgcccaccatgtggctggaacggtgaccacccagcaagaacccatctcccaccctcaccagtgatcccggaaaaccagtcactggggtcccgcggggcatccgaaggccaaggcaagtcacctttcagaatgtcccctctgtgcagcctttccaggaaggaagctggaccgggccagctgcatggatgccaggacctctaggccctgagcatcagggggtccagcccaggacaccccaagcctgggcccctctccctgctgaagggctctggggaggcggggagaagccagcaggcatggaggctgcccatcccccagccatggcctggggccccacgcagctctctgcctcccccaggagaacccccgcctcacagaagacttcgtgtcccacctggagaccgagctggagcagtcgaggctgcgggagacggagacactgggggcccttcgggagatgcaggacaaggttctcgacatggaaaaggtgcaatggggaggcagacgggcaggtgtcggggggaccctggggcacaggaggggtcctggataagctttgggagtgaccccaggtcagaatcccccacccccatgcacacacaaccatacatatgcacacacacagcacaaccccacgcggggcatgcccacgctcctgtatgaggcaaactccagcagcgtggcagcttctatgagcttcccggatacctgcatcccacctgtgtgtgtttcccccagtactgggttccaggaaggaagggaggagagagggggatgggggagggggacaggaaggagagaaaggaaggcccaggcccattgtggctgcctccctacacattcccatgcagacaccatcccagggcttctgggttcctccccaactgctctctgacttggcatcgactccactctcccacggagctcccagaggaaggaaagcacccagggacccattcacacattcagcaggagccattccccaccccctcgagcctgcactattttgggagtcctcccaaatggaggactgagaggccatctgcttccaggccctcatcaccagccaagagctgggctccgctcccgcctccctccacttcatagggaagtgtgcctccaggacatgctgctagatctgtcccagccctagacccaaacacgggtcagtgcggacctcatccagaaagctggatttgggtcctggagcacaaatcctccatcaatgagccctgggacaccaggacagggccaaggctggcactcagcctgttcccagggagagggactgcctggcctggtgtggcctggcctgggggccagagggcagacagggtgtttctgctggggcaggtcctccacctgatcatgtccctgaggggatggatctcagacctcggggagtcagtgtgtgcagcgcggcgtttatgggggttgccctaggacaccctgtgagagtaggtgctgttactacacccattttatagctgaggaactccaaccgggttccacaggcgagtccgctccccgtgggccttgtcaagggggtcgccctcccccatctgagccgcccaaggcagagctcaggaggaaacgtggctgggggcgtttgtcctgcaggaagggccatgcggctgcgctgctcccccaggccctgaccccactcttcccgcagaggaacagctcgctgcccgacgagaacaatgtggcgcagctgcaggaggagctgaaggcgctcaaggtgcgggaaggccaggcggtggcctcgacgcgagagcttaaactgcagctgcaggagctctcggacacctggcaggtgagggccgggtgggcgccggcgggcagagcgccccctagggccatcccctcggggttcttgggcggaggctgaccgccggcttctcggcttcaccccccaggcccatctggcccgcggcggccgctggaaggagtccccacggaagctggtcgtgggcgagctgcaggacgagctgatgagcgtgcgtctgcgcgaggcccaggccctggccgagggccgcgagctgcggcagcgcgtggtggaacttgagacgcaggtggactcggggggcctgctcgttggggaaggggcgtggtgtccgtggccagcccctgagttaggccctgaccgccgccgtcctccgtcctcccttcctccctatcccaggaccacatccaccgcaaccttctgaaccgcgtggaggcggagcgcgcggcgctgcaggagaagctgcagtacctggctgcacagaacaaggggctgcagacgcagctcagcgaaagccgccgcaagcaggccgaggccgagtgcaaggtgcagacccccgcggccccgccctgcccgtggcaccgcccccggacgcgcccctacatgaggccccgcccccaatccgcctctgccggcgtcctgcctcccgatctgcccctgcccgcggtcctcccgcccccgcccgcggccccgcctcctgacctgctcctgcccgcgaccccgcctcctgatccggccccgcctcctgaccacccccccccgcggtcccgcctcctgatccgcccccgcccgcggccacgcctcctgacccgcccccgcccgcacctcccttgcccgcggtcccgcccctgcccgcggtcctgcctcctgacccgcctccgcccgcggccccgcctcctcattcgcccctgcccgcggtcccgccccctgatgcgccgcgccccctgacccgccctcctttccccccaatcccccgaccccagagcaaggaggaggtgatggctgtgcgactgcgggaggcggacagcatggctgcggtggccgagatgcggcagcgcattgccgagctggagatccaggtgatcggcggggccggggtcggggggcgggggcgggggcagggcccggggcaggagcggggccggaccccaggcccagcatggcactggccccgcgtgacctggcgcaccccgcagagggaggaaggccgcatccagggccagctgaaccactcggactcatcgcagtacatccgcgagctcaaggaccagatcgaggagctgaaggccgaggtgagccggcgcggggatgccggggacaggcctgggtgtcgtcggcctgggacgagccgagcgcaggtgccttgcggaggatgcggctgggagggcggggcagaaggccggtccacgcctgcagcgccggtcccccgccccaggtgcggctgctgaagggcccgccgcccttcgaggacccgctggctttcgatgggctgagcctggcgcggcacttggacgaggactcgctgccgtcgtcggacgaggagctacttggcgtaggcgtgggcgctgccctgcaggacgcattgtaccctctgtccccgcgcgatgcgcgcttcttccgccgtctggagcggccggccaaggacagcgagggcagctcagacagcgacgccgatgagctggccgcgccctacagccagggtctggacaactgaggccatgcccagcgcgcccggagtcaggaggccgcagccgcggggggcgcccgggcagtccgcgttctgctccccacctgccgcacttgacaaactacgcgccctctgtggctcggccacccctaaagcgaggcccggcgaggcagcgcagagggtagggtccgacctgggctcctcagggccccggggcaggctctctatccccagcagtgtttacccatcttggtctgtacccctccgggccctctggcgttccaggggtgcctggaggggctgactgctctcttaacaggagggcagagggcaggggacagacgacccagaggtcccagcactgaatgagcaggcagctcccacctcctggcaggcttccttctgggacaggggcgacattgctgggaagtgctcaggaggtagccgaggcctgaggaaggagagcgccagctctgggctggacatcagcaccccacaacactcctcgggatgaagtgacccttgactagcccctggccatctctaggggagtcaggccgctggggacagatggccaggccggcctctcctgcctggcgcaggcaccgtggcccctgcagcggaaaccaaagtccccctactatgtgcggggcgcctggggactgagtggctaacgggaagcctccctgcttctctggggccagagcagcttccaggaagtgaagagacccctctccccagtgccccacatctttctctgggagacactcgcgccccctatcctggccagtgatggaggggtatctctacaggggtcctcggtctccatctacttccctttcttcatgtgtttccagccccaccctcagccagagccaggcccccaggcaggagcttcccagcgagcggcctcccctcacttcctcctggtggtcccgttgtctctgctgaatcagagctgagaacggtgccaaaatccaacgatgccccccaggccccttcctcccttcccccggccccccgggcctcatgaccctgggggctgcccccctcggtgctcccggagcctccagtagagtagcgtcacaagcaatctccctggcgcttcctgggtggggacccctgctccgtccccgcttcctagctgcccacttttcagtgttacgaagcctggggaccggggcaggcacccacggggctctccacacgccccctacactgcccgccaccattttgcacactgcctgttcacatgtcgcccaggcgggaaaaatggaaaataaagtgtatttacacagtca

SEQ ID NO: 459 - DNA, 5469 bp, Homo sapiens
  source 1..5469: mol_type = genomic DNA; note = NC_000013.11:c20192938-20187470 GJB2 [organism=Homo sapiens] [GeneID=2706] [chromosome=13]
gttgcggccccgcagcgcccgcgcgctcctctccccgactcggagcccctcggcggcgcccggcccaggacccgcctaggagcgcaggagccccagcgcagagaccccaacgccgagacccccgccccggccccgccgcgcttcctcccgacgcaggtgagcccgccggccccggactgcccggccaggaacctggcgcggggagggaccgcgagacccagagcggttgcccggccgcgtgggtctcggggaaccggggggctggaccaacacacgtccttgggccggggggcgggggccgccttctggagcgggcgtttctgcggccgagctccggagctggaatggggcggccggggaagtggacgcgatggcaccgcccggggtgcgagtggggccgggcgcgcgcgggaggggaaaaaggcgcgggcgagccgccagcgcgaggtttgtggtgtcgccgatgtcccttcggggtactctagcgcagccgcctggctacttgacccactgccaccaaacgttttaaattcaccgaaagcttagcttcgaagcaaagctccgtttcgccggtgaagcaggaagccttcgctgcaggaactgacctttacctcttggagcggcttctgcagaaaaatccccgggcagagatttgggcggagtttgcctagaactaacgcggagccagccgatcccggcctaccccggggccaagatttcagtggcttccctttttcctaaacacttcacgagggtctgtttccgggctgtgctccccgcctagaaggaaaatttttaggacccttgttcgcgaagaggtggtgtgcggctgagacccgcgtcctcaggacggttccatcagtgcctcgatcctgccccactggaggaggaaggcagcccgaacagcgctcacctaactaacagctgctgagagctgggttccgtggccatgcacctgggactgccttgagaagcgtggtacggccgtgtccccatgtgaccttagagtccctttcgaaactgctgtgcacagtcggtcacaatttcagacactggtgagaagggtggaggaaccctctggggacagccaggcaaggtcgaccacccatcacctaagggtggagaaatttaaggggtgaagagtcccttttgccttttctggatcctggtgattcacctagtgtcttccctaaggaactgaaccaactcctccgctggcctctggcagccctccaggcggtgcaggatggcgtgggcccggtaggaagctgcatgtaaccgcccagggtcgggaggccaggagggcagctcctcctctgacttgaatattgaaaacaacttcgtcctgcttctgagcccctcttaacccatgaccccctagcccattggggagtaaatcttaatttactcctcttcctgaaaaaggatctttaaaacaggtagcttcaactcaagctttataaaataacaatatagggtttctcggaactgtatttttctcagctgatggtaactggacaggtctgtagaagggtgtatgacctgggtttggcaggtggaagagggcaaaggataaacccctcctcctgcagccccatattcttggccaggtgtattgttgtaaaccaggagagagtttacttcggggagtatcctgttttccactcagtgagggccaatgaagaatgtctaattccataagatgcttttgttaaaatcggaatgttgctgtcctcggtggttctgctgttgggacgggactggcctgagctgtgggtgctgtagcaggacaaccagctcacctaagggcctcccagtctggattatcaatgggtcagtgctgaacctgggctaaaatattgttttttccaatgatgttgtctttcccaagctcagtgaagctaaatgtttcacaggcctatgtcaatctgatgtaactttcgtggccacctctctcctgttagcctctgaccaaggtggcactggatggtttctgcctgaccttggtgccccgtggcagcgactgtgggtcatgaaagacattcactacgagcctgcttctggagtccatcagaaaacgggatgcaacttgcctaaaatgaggagaggaggatgcttttaagaaaaagaagaaggaggattcactaccagctctgaagggtggaaaagagatgattcatccggattgtggagagggtggaatcttgtttaggagagcgttggttgtggcaggcagggtgtaactatgaatcagtgaagacaattcacatcctgggatgaaaagaaggccatgggctcacaggagattatccactggcctctccacatccgcttgcagtaaggagtgtgggactctcccaagcttcagcgctgaactgcaatgcagtgacgtcgcttagctgggccagtaaccgagggagttgaattttctgtcattttaaaataatgtgtcttttaagaaacactttgaaattaaaaccacagcccacaattataatgcactgttgcagcacttatcaaaacagatatgctaactgagccatcagtgccagcctgacagtgaggccaccaagccatccacaaagcctacacgaaagtctgtgctcacagtggcttttctccatgaagagggcattcctaacctcttcctttcacgtaggaggaagcaaggtcctttgtaaaattttaactcggggtgcctcaaatgtaaacttaaccactggtaacaacagtttcactgctacatgccacgtctgtgaaaattcattcaagacattaaggaaagtggctcagcagagagactagacatcttatcctcacggttctcctgtacttggcctctcagcctttgagcaaggttggcccaagctagtatcggccccagtggtacagccaaaacttgagactgcaaatggatgcagctgttgaacgctgagtaacttctgcagagtcaggaagacccaaggaagctctgcagaggatgcaggggtacggtcagaacccctgagtgcctttcagctaacgaggactttatgacactccccagcacagcaaatttttatgatgtgtttaaagattgggtgaattactcaggtgaacaagctactttttatcagagaacacctaaaaacacgttcaagagggtttgggaactatacatttaatcctatgacaaactaagttggttctgtcttcacctgttttggtgaggttgtgtaagagttggtgtttgctcaggaagagatttaagcatgcttgcttacccagactcagagaagtctccctgttctgtcctagctagtgattcctgtgttgtgtgcattcgtcttttccagagcaaaccgcccagagtagaagatggattggggcacgctgcagacgatcctggggggtgtgaacaaacactccaccagcattggaaagatctggctcaccgtcctcttcatttttcgcattatgatcctcgttgtggctgcaaaggaggtgtggggagatgagcaggccgactttgtctgcaacaccctgcagccaggctgcaagaacgtgtgctacgatcactacttccccatctcccacatccggctatgggccctgcagctgatcttcgtgtccacgccagcgctcctagtggccatgcacgtggcctaccggagacatgagaagaagaggaagttcatcaagggggagataaagagtgaatttaaggacatcgaggagatcaaaacccagaaggtccgcatcgaaggctccctgtggtggacctacacaagcagcatcttcttccgggtcatcttcgaagccgccttcatgtacgtcttctatgtcatgtacgacggcttctccatgcagcggctggtgaagtgcaacgcctggccttgtcccaacactgtggactgctttgtgtcccggcccacggagaagactgtcttcacagtgttcatgattgcagtgtctggaatttgcatcctgctgaatgtcactgaattgtgttatttgctaattagatattgttctgggaagtcaaaaaagccagtttaacgcattgcccagttgttagattaagaaatagacagcatgagagggatgaggcaacccgtgctcagctgtcaaggctcagtcgctagcatttcccaacacaaagattctgaccttaaatgcaaccatttgaaacccctgtaggcctcaggtgaaactccagatgccacaatggagctctgctcccctaaagcctcaaaacaaaggcctaattctatgcctgtcttaattttctttcacttaagttagttccactgagaccccaggctgttaggggttattggtgtaaggtactttcatattttaaacagaggatatcggcatttgtttctttctctgaggacaagagaaaaaagccaggttccacagaggacacagagaaggtttgggtgtcctcctggggttctttttgccaactttccccacgttaaaggtgaacattggttctttcatttgctttggaagttttaatctctaacagtggacaaagttaccagtgccttaaactctgttacactttttggaagtgaaaactttgtagtatgataggttattttgatgtaaagatgttctggataccattatatgttccccctgtttcagaggctcagattgtaatatgtaaatggtatgtcattcgctactatgatttaatttgaaatatggtcttttggttatgaatactttgcagcacagctgagaggctgtctgttgtattcattgtggtcatagcacctaacaacattgtagcctcaatcgagtgagacagactagaagttcctagtgatggcttatgatagcaaatggcctcatgtcaaatatttagatgtaattttgtgtaagaaatacagactggatgtaccaccaactactacctgtaatgacaggcctgtccaacacatctcccttttccatgactgtggtagccagcatcggaaagaacgctgatttaaagaggtcgcttgggaattttattgacacagtaccatttaatggggaggacaaaatggggcaggggagggagaagtttctgtcgttaaaaacagatttggaaagactggactctaaagtctgttgattaaagatgagctttgtctacttcaaaagtttgtttgcttaccccttcagcctccaattttttaagtgaaaatatagctaataacatgtgaaaagaatagaagctaaggtttagataaatattgagcagatctataggaagattgaacctgaatattgccattatgcttgacatggtttccaaaaaatggtactccacatatttcagtgagggtaagtattttcctgttgtcaagaatagcattgtaaaagcattttgtaataataaagaatagctttaatgatatgcttgtaactaaaataattttgtaatgtatcaaatacatttaaaacattaaaatataatctctataataa

SEQ ID NO: 460 - DNA, 728399 bp, Homo sapiens
  source 1..728399: mol_type = genomic DNA; note = NC_000012.12:1969552-2697950 CACNA1C [organism=Homo sapiens] [GeneID=775] [chromosome=12]
ttttttttttttttaagaacgtctgagttctgaagcccatgtgctatgagagcttttacatcaaaacaaaattctttcatctcaagatcattgaatgtgtatcttgaaacttcatattcaaggttgcttccagtccatcaacaataattccctactctaattccctacacagattcctacactaacctgcataccctcacgttcttgaagtcaaagcagattggatcactgacgttcaaccacttaataaatctgagtatgtttgcgtgtcttggtgactttaaccttagttacaaaactaggagcctggcctatttttttggttatagtgtaagttttctttccttgaagactgacttttccaaaactatcaaaggagaaagatggcagtaagggagaaaaacagagcataactcagaaacacgaggcccaatggcagaggaaaaaatggccgttgttgtctcatgaataggctctattaataagaatattctgggtatctttcgtttgatgttatacatttgcggcatttgacataaggaattaggctttcgtaagggtgggatgccaagaaaactgttgatacaaatagaaaagcagtttgacagtgtcatcaccatgagataactgaaatgcagatttagggagcgaaaatgctacggaacatctttcaaatgtcaaagcaaaatgaaggaaagattgagtttgcagtaattatttaagacatcgtgaagacttctttaggacccaaccatttatctccaaagcaacatggctttaaaaattaaaatgagatcattttgagataactcttttgatcccagtttagtctggacagaaaatttaaatagccaaaggggaaaaaaaaaccattaaccaagagttctggctaccgaaaagaggcaccaagataaaatgcagaactgggcctaactttcttctccctaaaatagttttgcaacttgagtgcattcccctgggaaagaggctgtgaattccatggaagtatgcattccaagtttcctgcctcttagccctaaggtctaccaacccctggacaaacctatcactcttccacacaagagggtctatcaaagcagtctgtggagatatataaaaaccagagatcaccatgccttagggaggtgatgagctgacaggctgacagaaaccatgaagttcacatttcaatccaagttttcccgtaaagccactggctgagaggcccatccctacataggcagggagcagagcagggaagacgaaaatacaaggttgaaaagaatcaagtaagaaggtgttttgttttgttttttagaattctaaaacttaaaaggaattttactgtaacttaaacttgcagcgatacgatacggccatgtcaacttttgtggcactgaaatgttactgcaggaatagcttctgggttttaaaaaattataagagatcatgagcaggataattatttagctttaaaaatcaaccaattaatatacatctggaaattcacaatgcttcgagcctttgttcagcctggtacgcctgcataccagccgcttcccagccacctgtctgccaacacggaggtcaagtttaagggtactttggtgcatgaagctcaactcaactatttctacatctctcctggaggtaagaaaccctaaagtgaaataaagagtaggaagaacatgttgaaatttactctaaatatcctaatgatacctagaatgtgacttcctcactctaagaactcatctctccatatttaatcaggatttaccacacaccgttgtaaaattttgcctgtaactgcactatcctggtttatgccgttctttggaaattctcaattgaaaaaaagtgatgtttgaggcaacaggcaatgcaatactgcctttacataatgaaacaccaatcttttactttccttttaactccgtcagtaagatcaaggagatcaaaatttccatatagacttcatgtctggattttttaggtccacaaagacaaggcagagagcaagctgattatattcagtagtggtattttctttttaaatttcttcagtggaaaaaccaaaagctggtcaaattttaagaggctagttaaggggccattaaaggcagtgtcatgtcagcgtcattcaaatgtacattttcatttgtaaccctttgattcttattagcatggtgcattagttcattttgcatgttctttggggatttgccttatctcatttatgttcctaataaatatttctgtttgatctgttcttttaagatatttataatttgttttatatttttacccaaataccatacaactccaaatcatgaatgatagcttgtaatcgtctaatgaggacatgtgataatgtttgtgtaaatttttaaaagaagatatatatccattcaattaggaagtggatgataaacacataattacatgggtaaaatttaaataggcaggacatctgatttggtaatgttctttctaatataacttcactaattcctctcaaaaagacagggaaatatgtttttcttagcattcagcaaggaaggcatttaagttccctctttttacttggaaagccacggaaacgtggtagtgtgacattacacaaacctcttctgggcatctaaggataaaccaaaatttaaaattccttcaaactccactcctttcatgaagtcttcctcacaagagtagaataatattttcaatgtaaggatggagaatatctaatcatatatttgtgtaaacacttgtttctgagacttcattcaaatataatgtttcttgatttactatagcatttatctagatcaagctttaataaatctgaccacattgatgatgactcgttactagcatatggtagtacacatgcacacacagctactaggcatttgaaagatcccaagatatttaaaaaaaacagaaaaatagaaccatgaaattttagagccagaagtcaggtaagaagcatgcagttcaagaacctatttcaccaatgaggaatctgtggtctaacaaggttaaataagctagccaaagtcatttttcttggtttaatctgtttcccctaaaacatgcccttctcccagcctttcaaatgaaatacatgaagcattcaaatttgtttttacatattggattgagttctaggcttggttataaaagactggaattagtctttttaaaccaaagttcatatggactctcaaaaggaaaaaaagaaggatggaatgaagggaggggggagatcagtgaggaagggagggagggagagggagaaaaagagagaaaagaaagaggaagggaattaagctttctggtagtggcagtgttttcacagcagtaaacactcgagcagcaatgacgctgcctgtgtgctggcatccatagatgggaaacacaggctgcgtttggccggctctgtgcggattctgtacttcttccccatttggaatgtttgcactcaaaatgctttcctccggcatgttctctaatgcctttaaagtaatgttcttccattcaccttctgcgttagctttactgaccaaacacggacacaatcttgtaaaacaaaatcttcactggccactgagagtctacatagcactgttatctttggcccctggtctgcttcttttcatatgacatggttttactgcacctcacaaatcagcgatcccatgacctgagaataatggaaggttcaaagcagatgagaagcagtttctattttatgggtgactaatactcatgaacattttgggggaaacagtagaaacaaacctcccctttctaaataaattaatgttattagaaagttaatgccattaaaaacaaacaaaactctctgaattaaagcattatactaatttggattaaattaatatgtactctccaactataaatgagaatttattactttcccagtaaaagacagatttaatcttttagaaagttttaatttataatggattcatgttatatcattcaatcttcctaatcttcccagagatcatcatcttcctaaactgggaaccttgaggtcatctactaccctcaggtttaccaaaggtcatatggaatctttttcatcgtatactaatttcctagttttatttgttcctttaatctaagagatataacagagtaaataaacttttaaaaattaggaagcagaaaagtccatagtttacaacaaatataaatagaaacaacttattctgctttgttggccacttaaatttatattttcatttgttcataatcttgctgaaaaatttcaaaatctccttggccacaaatatcatgcagggagtccctaatacatcttttccttctctctactcgtccttgaagacccaggctttctcactcctctaggaataaacagtcccaactttttctttgctcctgtagttttgtatatccttgtagtaaaaaaggtaataaattaagcatttataaatctgttccctccactagactataagctcctggaggggaggactttgttaaaacacccagtacagcaaacagcatgtgcagacattcaacaaatacttgctgagttgaaatgaaatctaagacttcaagctcttctaccatcaataacccttgtaattgctaatatcaataattatcacttcctggaataattcaacatgtggactagatatgctagaattctctatcaattgattacaccttctaccagaaatttcagcatggacagtctcctcatatcaccgcttttgttctccttcaaccttcactgagagtttattttgcttcaaacactttaccttcttatgcttaagtagtgttgatgggattctgtcattaggatatgagctcccgaagactgtatatttcgattgatccagcactatgtagacactaatgtactcgtttaatgtgtatttactattacaactctaccatataccattcttcctgattgactacttgttaggcactggcaactaagagctcaaaggatgcaacaattctgcaaaatcacatgcatttctcttcattatggaaaaacaaaggacaaataataactaatagtactttggtctaccagaaaatccaagctattcatattctagtcgcgtttgataatggcaatcccaagcttacatatataagcacctgaatgacctgaaaaatgtaagatttagatgcatgtcagtcattccagcaacacactgacaactatcaccataagtgaatctcaatgtacataaataagtccagtctcctataatcgcagtttttgagaaagctatgtttaaacatgtctatttatgcttaagcttatttttaaaacagaatatttctacaggtcaaaaatttgttccaatgaagaacagacttcttcatatttgagccagatgatttaattgagtgtttaacaatgataggaatagctctgctgaaaatagcctaactataaaacacatgatcacagaaatatttctacaatttgacatagcagtagtctagccaaaggagcctagtgctacttcctgattaaagaaaagtcagagtttctttattttttcatttttaccttaatctgtgaatatagacataggagatactactttccaaaagactctttccaaaaaccctttatgtttaaacagttaaattgtgttttggttctactatgaaataagagctctaaggctatacataaggtaattctaatacaagttcttggccaaaattgttttccttcttcaaaacccataatttttccttctgtgggttaagcagtaaatttactttgattccagaacttgattatttgaaactatttactaaatgatttttggacaaaaattagtaatataaaacacagaatctaaaagaatacacattatatagccataatgaccacttactatagataaagggtagggaaactaaaagatgctttccttattaagcatttaagaaaatgttttggaacccagcttttctctgccaagaatttagacttccaccatgctaaactgggctctcttaaacacaaaacataaaatacactgcatgtccaagccacagatgcagcgtatcaatctgaatagcattactatgttttcttggtcaagctgagaaccttaatagtctttatggtttaggataaaacaagtgactttactttgtagcagctgtaaatcaccatatatgactttgccacatgggtttttcctcacctcagcatgtcagattgttaagttacataagaaatgtatatattcacatgaaggttctctccgtgagtcccctggcagttatgatggagaagtagaaactgtgttaattggatggtcagggtgaagagaagggttgtttactcacactgtgtatctgcttatgtgtgtgtttcaaggaactatctggtgtcacaactcaacacacagaaaaatagaaatacgaaatccagagataccacaaggctcaagagtgaaattctgctttacttgagatttttcagagcctttctttagatggatagttttctttagagtttagatcccttcctttcagcctaagtggagtactgacagagaacaaaaaagtcattttggattaaaggtcacagtgacaagtttcatcactcaagtcacagtagacgtataaccctttatcatatattaacatgttagctctctaagcaatggtgcataataaatagatcaatttttcagtcggaatggcaaaggagacttagagacacaaagtaagattcagtgaccacattatgatttttaaattttggtggctcttctttctttctcattaaatgcaggcttaaaaggagtccttgaaagtttctaattcaaccaaccactcctctcacatacagtaaaagagcctcaagactgtataggttacctattctgactaaatatgaaatgtcaaattcctcggctcccattcctcactgctcatgatgtgaatgagtctactttaaggtcttgtcttcctgggcagatcccgaagagaaatgtattctgttattcctgcaaatactaagtttttgcctagtaagaatgtcaagtatttttagccatatagttactttaaatattagtttcttgaccctagagagctttaggggttcaataaaatccctaaaactatatgcaaaatgtcatgtatatatgcaaattttgggaggtgaaaaagtgcaaagcatagaccctctaaaacaatgtctggcacacagcagtcaagcaaatatatttgaggaaagggggagagggagggagggagggggaggaaggaaagtaggaagtaaagaaggaagaaatgaaggaaaaaagggaagaagaaaagtcttcagattctcataggggtttgtgactcacagaagattaggaactactatttgcgactatcaatatgccaataaatatcctagaatggaaaacaaccctcagttatctctgggcagataatgtgtctttcatttacttggtaataaatttacacagagttcacttttaactttccagattgcttttgtaatcactgcctaaactgattgcaaggttaagaaaagacgtaacaaagtctccaagtcttagaatttgttaagttggaagagcttttattcctccatgtagcctgaagcctaggagaaagcttaaaaagcacagatctgttagcatgctcggccatgatgagggtgaatcacacagttcagctgtggctactggtttgccttcgttggagaggtgtcattctccgtctctaccatgaagtgggaaacaggaagacattttggaaagctcgacaactttgtgactcctgcttgatcactccaagcagcgtatcttcaaagctttgtcttatgcattctgatgttccagatgccacacaaaatcatcagatacacatatacacatataacaattctagaatataagtgatttgcgaattttgttaagtacactgtacatgtctatttcttatctaaatctgtttatttcctgtgtttatttggcaccacagaatataagtaaaatataagatatggtctttgcccataaggggcctgtaatttattatccataccactgccttctcaatagcctagataattagcaaccaattaattaatggtaacatagtggcagagaaaacgttttacaaaatgcattctaagtatagtgagcaatattgtttccaaattatgactcatcattgttctctaaatttgactttcttactgctattatttactatgggtatatacaggtacactttaactttggagctttggaagacaatcaagtttatacttcataagatgttctataatagccaccaagaaaatatctactattatatttttaaactgtattgtttttatatgtttcattctagagaaagcactgcagaataatgctaaggctcctctttgctaggaaattgacatttaaaaaaattgactctcaagagagaagtggaaggttaattccttccactcaggaaaaatattaagttatacggtttccatatttttggcaaagagaaatcttgcttctctgaccatggggagaaagcagatgtcgcaacccagagaaagggggcatagccttctcactgatctggaaactagaaatgcagactcaactatttctattacctcacattacttggggctttcagttgacatcaagcttttggtattatgttggtttaaagtactgaagatgtgttttagaacaaggactgctttatttccaggttgaaaaagccaagacgcaaagtaataaagagttagtgtaatattctaaccaacacagcagagatcagggttagcagaaacactggttaataaatgtcaggaaaataaagaagggtaaaaaattatccttaaattttcatttatttaaatacttcttttataaggttcaattatttctactttcttacattgaagaatcatttatgtacaagaaaatgcacagatcttaaagtgttctgctcagtgagttggcaataaaacactcttatgtaaccaacactgaaaacaagatataaaatatttttatcactcttttccagtcaacaaccacaccccacttccaccaccagccccagcagagacaaccaattttttacttctatcaccctagattagttttgcctgttcttcaacttcatataaacttcatataaatggggtcgtacagtatatcctcttttgtagatggcttgctttgctcaacatgtttctgaaattaattcatgttgttgaatatatcagtagttcatttcttcttatcgctgagtagtgttctattattatataccaaaatttgttcatctatgtaactattaatgggtatccaggttattaccagagttttttgctattatgaataaaactgctttgagcatttgtgtaaaagtctttgtgtggacatgtgctttcggagtctcactctgtcacccaggctggagtgcaatggcgcgatcttggctcactgctgcaacctccgcctcccgcgttcaagaaattctcctgcctcaggctcccaagtggctgggattacacgtgcccgccatcgagcctggctaattttttttatttttagtagagatggggtttcgccatgttggccaggctggtctcaaactcctgacctcaggtgatccgcctgcttcggcctcccaaagtgttgggattacaagcgtgagccacagcgcctggattttttgtttgtttgtctttgagacggagtctggcttcatcgcccaggctggagtgcagtggtgccatcttggctcactacaacctccaccttcagggttcaagtgatcctgccttggcctccccagtagctgggatcacaggggcctgccaccatgcctggctaatttttgtatttttagtagagagggggtttcaccatgttggccaggctcgtctcgaactcctgacctcaagtgatccgcccgcctcagcctcccatagtgttgggattacaggcgtgagccaccgtgcccagcccatttctcttaagtaaataactacgaacggaacttgttggatcatacgctagttatatgtttaagtttatgagaaattgccaaatagttctccaaagtagttgtagcatattactctttcacaagcaatgtatcaaagtttccattgctccacatcctcattaacacttgtctttttaattttagccattctaaggagtatgtgatattcttatttgggctttaatctgcataggtttccaatgtccaataagcatatgaagaaatgctcaatacagtctgttgttatggtaaaatgcaaattaaaatcacaatgagatatcacttcagaattcccagaaaattaaaaaaaacaaacaatatcaagttttgacaaggatgtggagcaaatgggaagtcttagacattattggagagagtacaaataggcacataactgttcagcagtatctctaaagctaaacaaacccatacactatgtccccatcaatttcactcctaggtataaacccaagatagataggcatacatatccacctaaaaaacatggacaggaatgttcatggcaactttattcagaatagctcaaatttggaaataattcaagtatctatcgataggagaataaatagactgcaatataatgatgcagtggagtactacacagaataaaaagcaagaaactacggctacatgcattcacttcaaagtacctgaggaatcatgttaagaatcttttcatgtgactattggtatttgtatatcttctttttaaaagcgtcttttcaaatcttttgctaatttttaagttggcttgtctttctgttgttaatttctaagtgttatttacatattctcaatatagtgctgagtcagatatatgtacatgttctcaatatgttttcccagtctgtggtttttcttttcattatcccaaaggtatcttaagaacagaagtttttaatttgatgaaatttttacttttgatgaggtaaaatttatcattttttgttttatagtaaatgcttataagtgtcattttaaatccagtgtttggtaatactacctttaactatttttaataaagagttatttatttcgttgcttctataaaaatgaaaaaaagttcttatttcatttgcagataaaacatcgatagcataagcttttctgtttaaaccacacggccatggtttaacagggccaggaggaaacagagatgtggcctgttttcatgtatcataattaagatatcaagtttaacacagtgaataaacttcttaaatatcaaatcacaatatctcaataagcataaaacaagttgaaggagacatccataacagtgctttttagaatttaaataaagttctataaagaaaatttatattatatatatgcattatacatcatcttgttcacatagataaaactaacattttcccacattacatatctcttccttgaactattaaatttcccatgatgaggatgtatggcattctcacaactcacaatcacctctaggaacttgtaggtaaatgttaccactacacatattaaagtaaccttgagaagctgagcggctcctaggtaagctgctaaaatcactcactgcttcgggtttctacacaggaaccacagaggctccttaatgcctaatggctaatgctccaaaagaaaaactaaagaaatagttgtgaacttttaggttaagtttcagccatagctttgaataaagaaatccaataaaaacaattcagtactcattgcaaatatttaattgtgcacatttaatgcaaggaattcagtgctatgggggactggaaagacacctttgccctgaaggtgcctgcactctaacagagaagccaggacaaaatattatacataaggtaaactataagcacaactagtaattgcctttatttctagctcagatttagcatgttattttgaacatatatgtttacatgtctgtctttcgtgctaggatggtaaactgtaagggggaagggatatagcttattcgttactgccaaaacccaacacagaatcagtttcaacagacaagtgctcaataacaaatgagcaaagcaaatataagtacaacataaaagacatatatgctgcagtgagacatcacagctacacaggggactcacaaaaacatccagggaggtaaagttccagctgggttttgaaatatgagtagaatttatctggtagagattggtcagaatgagggagagaatttaaggagaaaaaagaatatttaaaagcatgcaggtaagagtgttctgggaaagtgtatatgtagttgtttgcttggagcattaggcaagcgtgcaagagtagcagcagatgtgatctgaaagggtaactgacctgactacagccagctttaaatgttaggtgaaaagttttacttggaaggcatttcagattttgagaaggaaagcaaattaattaggcttgtgctacaggaagataaatccagctgtggttttggatggaggggataagccagatgtgaattataaggctaacgacatatcctttttatgaattgctggattcaatttgctagtattttttccttttttattgtgttaaaatattaaaaacattaaatttacagtttaaaatatgcagttcagtggcattaagcacatccacaatattgtgcaaccatcaccgctatccatctccagaactttttcatcatcccaaactaaaactctgtacccattagaagataactccccactctccattccctgaagcccctgaaaaccactattttactttctgtctgtatgaatttgactactctaggtacctcacagaagtggaatcatacaatatttgttcttttgtgtctggtttaacttagcataatgtcttcaaggttcattcacgttgtactatatatataattttattctcttttgaggttgaataatattccattgtatgtgtatataatattttgtttatccattcattcactgatggatgtttgggttattcccaccatttggctactgtgaataatgctactataaacatttttttgttcgcattttgctgaggatttttatacctatattcacaagagacattgatcaataattttcttttcttgaaatgtctttgccttgttttggtatcaggataatgctgccctcataaaatgagttggaaaataatacctcttctactttctgaaagagattgtatagaattggtattattcctcccttgaacatttggtagaattcaccagttaaactatctgaacttggagttttgttagatttttaattacaaattcaattccttattatgggactattcagcttacctatttttcttgagttaattctgatgatttgtatttctcagtgaattagtccatttcatctaagttgctgaattatagtactcccttattatccttttaatgtctgtagatagcctttctttcatttctgatactgctaatttgtgtcttctttttttttttccttcatcagtctggccaggtgtttaccagttttactgattcttttcaaagataatcaggttttggtttcactaattttctctaaacagtttttttgttttttatctcattgatttctcttctttttatttctttccttctgtttgctttggatttaatatactcttctcctattttctttaagtgaacgtttgaattactgacttaagaactttcttcttttccaatacaagtatttgatgctataaatttccctgtaagtccaactttggttgcaactgaaatattataattttcattgttattcagttcaaatgttctctaattttctttcttctttgacatgactttttcagaagtatgctgtttaatttccaaatatttggggatattccagatacctttctgttgttgatgtctaatttaattctattgtggtcccaagaatatactttgtatgatttcaactctttaaaaatttttaaggtttgctttatgacctacgataaggtttatcttggggaatgtttcacgtgcacttgagaagaacgtccattctgctgtcattcgatagaatataatataaatgacagctgtgtttagttgatagtgttgttcaagtcttccatatacttgctgttttctgtcctcttgctctattgattgtagaaagtggagcactaaattctccaagtaactgcagaattaaaaaaaaaacaaaaacttctcctttcggttctatcactttttgcttcacacactttgaagctctgtatttaggtgcatacacattaataattattatgccttttggatgactttatccctatatcattatgcaatgtcgttttttatccctggtaattttcattgttctgacatctactttgtctgatgttaatctagacaccccagttttcttttcattagtatttgcatggtatatctttcttcatccttttacctttaacctatctatattgttacatttaaaatgggttttgtgtagaaagcatatagttaggccatgcttttttaatccaatctggcaatctcttttaatcactatgttagcccatttacatgtaacgtaactaccgatatggttgaacttgggtaggtctaccgttttattttttgtttaatgtttgtcatgttttttgctctcctgttaccctctttcttgtcttcttttgggttatttgaattttttagtattctattttatctcttggtgatatctctatatttctttttagtggttgctctaagaaatacaatatacatatctaactttacccagtctatacttagagtttttcttttaccacttcaaacagaatgtaaaggctctataagtgtacaggtccatttaccctctctttttatgttatagttgtcacatgtatcacatccgtatacactgaacctccttcctgacaatgttataacttttgctttcaacagtcacatgtattttaaagaatttgagaggagaaaaaataaatcttttgtaattacccgtatatttactatttctgttgttcctacttcatcctgcaattccagctttccctttgatattattccttccagcctgaagaatttcttttagcatttattctacagtgggtcttctggtaaaaaaaaaaaaaaaaaaaaaaaggttctttttatgtttcctttatcagagtatatgtctttatttcaccttcattcctgaatgatatttttgctggaaatagaattctaggttaatagctcttttatttccaaacttgaaaatgttgctccactgtcttctggcctacataatttctgataagaaatctgcagtcattcaaaacattattatcctagatgtaacacaatggttttctctggtttgctttcaagattaaaaaaaaaaaaaaatctttgtttttcagcagtttgattgtgactgtcatgtcatgggcatggttttctttgggtttattctgtttggggattcactgagttccttgaatctatacatttgtctccttcattagactgggaaaggttttggacattattttttcaaatatttatgagtctctcctctttattagacttcaatggcacaaattagaccttctgatattgccccacggatttctgaaggccctgttcatttttaaaaaacatcttggctctatattcttcaggtttgaaaatttctattgacctatctatgagttcactaactcttctttccactgtcatctgcattttgctattaagaccatccaagaaatagtatattattcagttccaaattttccatttggttattttttatacctatttttgtgccaagaatttctatctttccattcttttcaagagtatccagttttacctcacagagcatggtaataactatcttaatgtcactatcttataattctaacatccagatcatctcagggtggctactgattttttccttgacagtttggcatattttcctggctagtaattttggattgcaccctggacatttttattattttgtgagactcagagtcctcttgaaaccctccagagaatgttcactttgtatatttgagaaagcaatcaattcagttaggtttagataagaagctctgtcttgctgcctgtggatgatgcttcccatatcagttccattttcttttttctttttttttgagacgagtctccctctgtcgcccaggctggagtgcagtggtgcgatcttggctcactgcaagctccacctcctgggttcacgccattctcctgcctcagcctcccaagtagctgggactgcaggtgcctgccaccacacttggctaattttgttttgtatttttagtagagatggagtttcaccgtgttagccaggatggtctcgatctcctgacctcgtgatctgcccgccttggcctcccaaagtgctgggattacaggcgtgagccactgcgcccagccgtcagttctattttcaaaggtgtttatgtctgccctatacatatactagtctgaatttggaataatggtttatattgtaagttaattctcaaagctgttgttatttcctgggttctgttacatgtatgtagctcacaggtggacccaggatttgcatgagttcctagacagaattaggagatctcctcatccagctccctcctctagaattgctcccactcgccagctgtcaggggcctttttccccagtcttccgactacaaagtcagggtttatctcagggttttagactctcacactgtcagacagtctgtgcagcaaaagaaaataaaaataaaaatacataatgggattttcctccactcttcagaccacaggggcagagacagggtctttcttgggatgtcaggtgcctgtgctaccaccatgaccaccacagtggcagttcagctttccctgcaactggcttcacggtaggggtagaagagtaaaagggaggtagggaaagaaaagggggaagtttttagaaagaggagtttctctcaggttttgttattttttttttcctagcgttctgtgacttggcgcattcttgggtcaaagccagttgataaaagaggaaagaataaagccaggaactcaccaccatagcagtttttcttcaagttctgattgctctcctcagtgtgtctgttgtcatttactttcagaggccccagttagttgcttttgtaatctgcccagaacttttagttgtaaacagtgggagagatatactgtagtgaacttattctattttggatgatgccagaagttcaatccctttttgctatggggggttatgaaacatcccaagtaacacataatgaaagcctgaactggaatagaagtggggatagaacgaaggagagaagctacagaaccactccagaattaagaaacatggctgtgaaggcttcaaaaggtttactattaccacgcatgcttaaaaaaaagaacttacaggaactcccagctttacaaacgatttgttaatacaaatgggcattagaagtactctgccctgctgctaaggaaattatattcttggcctctatacagttttattcttgaatggattttcctacagaaataatcctacatatgctagtgctgtatttcatatgtacatcattataatactagtatgctactcttaaacaggtgcacactgggctagaaaggcttttgtgagttgacttggaaagctaaccacaactaaaattatgttttttatgagagaatgtattttgatatccaattatatttttggtttttatttccataaaaataatacatgtacataattttagaagttaaataatactgtgaacttcatagcaaatagaacccttctctagtcactccattcttgattactgctccctgaaagcaatttaaattacatctacgacagttctttctgctctccatttatttctcatccaatttttcttatggtatttaaatccctttcccatatatcatgtatgtaccatttcttgattttcaaaaattgactgaagaggattcagttttcttacaatacacacaaattcacacacagatacacacacatacaaccccatccttccaatataatgctttcatattcagtgtctttaactatgtattatgatttgcagagctacatggtgtactatgattacatttccttttttgttcaatattttgttttcccaggaattaaaaagggtttcttctgtctccctcccccttagttttcaatgctcctcatatcatcaccaaactcttaaaaagtagctgtaaatgtcccaatagattcaaactatcagttgtaaattttttcttggataccattcctgaagcaattcaccctttgactttaatttaaatcccctccagttgcacaggggtcattacgggactcttcacctttgctctgggagattcccttcttcctggatgatttgtatatcagtcacaataggccaagttatgctacagtaacaaatgacaccaaaatctcaatggcttagcttacaatgacacaggtttatttctacaagctacgtgtccatcatgggtcattgttacctctgtgccatgttatcttcatttcagaacctaggctcacaaagcagcctctgcctggaatattgctggtcatcatggcagaaggaaaaaaggcagtaaatcttaagctagttcttaaaatatttgctcagaagtgatacatatcactttcagccacatttcactggccaaagcaattagtatagccatacttgagtacaacaaggtgagtacatattaccattctgcagggtgggtcaatgcgtggtatagccaacagagcaaagataaataaccctctgtgaggaggcaacgctcatgtttgtgaacaataaagctattacagcacgcttcctatttcttgtttattctatctctttcgtaaaatggatccttcatcctttgggtttatgtctttttaatttttttactgtcatttcaagagaatttcaggaaaactaggagtgtgctcactctgccatcgtttacccaaaagtctaccaaccactcactttagaaggcaacttttatgaagatggcctatttagaagatgggggctacctgtaattttccttttcattcagggtactatttccgttatttatagcagtttttcccagatcctatgaatgttaatcaaggatttaaactgtcatttcttttttcatacaaaactacccaaaatggtaaattcactttaagacttaggaggagttttctaaaatagttttggtcctaaatatcttaagtttttcttttctgatttgatctaaacttcaggtttacatctgcaataaaatccagcatctaaaaagaatttcattgcaatcctataactgtggattatatcctatattcaacttgttggcctagctctgaaatatccctgtcagctgggcatggtggctcccgcctgtaatgccaactactcaggaggctgaggtgggaagatcacttgaggccaggaatttgaaaccagcctgggaaacacagcaagatcctgtctctaaaaaggttgttttaaattatctggatatggcggtttagcccaggagttcaaggttgcaatgaggctatgaccaatgccatggcactccagcctgggtgacagagcaagaacttgtctctaaagagcagagcaggagcaggagcaggagcaggagcagagcaaagagaaaaaggaaagaggaaagaaaagggaaagggaaagggaaaggaaaggggctgggcgtggtggctcacgcctataatcccagccctttgggaggccaaggtgggtgatcacttgaagtcaggagtttgagaccatcctggccaacacggtgaaaccctgtctctactaaaaacacaaaaatcagccaggcatggtgccatacacctataatcccagctactcagaggctgaggcaggagaattgcttgaacttgggaggtggaggctgcaataagccgagattgtgccactgcactccagcctggacaaatagagcaagactccgtctcaattgaaaaagcaagaaaagaaaggaatccccatgtcattgctgtctataacttaagtattatatttgggaaaatatatttccatatgctaatatcttatttagttgcgaaatgaaaaacacagtaagtgattactatatgggaatattacaaaagaagtggtctaattcagctttttgttaaattagtttttaatctggtaaaaactaatctctctaataactgatatatgcttgaatctcaaggctaaaaaaacttgctttttaaaccttggagcgtactctaaaataactaagtgtttgtaaatgataaacttggctcaaatgcattatttactgctagtacttcactgcttgggccttgggtctcgaagttaaggtttcttggttcaagtggtgtttccatctcaaaatagtcatggaccacagcgtatcacttaatccctttaaccttagtattctcatttataaaacaggaataacagtattttcaagaaaaagttatgggataacccatataaaacctgaacatagtgtttggcagacagtaaatgtttgttgaataaatgaatgaatgaaatgtttgccctaactttaacagctatcttacttacttttaaagttcatacaggtcaaaccccattttaacaatgtttaaaccctttaaacaatgtataaacccttttctgtaataaagtaatctattttgtgtttgaatgaagttactctatttatcaagcatctttttttggctgattaaatgaagagagtttgggattttcatttctttattttgctcttctacattcatccaattcaagaaagggattttttttttctctcctaatgaatctaaaaaacctcaccacaaacctctatcaattctacctttgtctatttgaaatgcccaaatatggcctatgacatacataagccaatgtgaaatgcaaagaccagacagagagattcttgactatacagaatatcttgaggaaatagtcttacaaaaacaatcctgagtaaagctgagttccttgcccaaagaaaggccaaccaatctatatgccaccaaagaacatgtaaaccatacataattattatataacatatttgaattctattaaaacgtttaagaggtatctgacactctgacagcacctgtggtaaacccttctgtgtacctttgatgcccgggattgaaaaggcttttgcaaacaacataaaaccaaatgactctgggtgcaaaggcaatcagtatcagatagaaaggacaaaaaaaaaaaaaaggcaaaatgaatccagaaaagtaaatagatccattccctttcactctttgttgttcaactgattctatttcttttgtatggaaattcattagaaacattttaatatgcatcccaaaggctacctttaatttgcatccatgtttaatagtagagcagtacaggtggtgtggaaaaagcaacggaagtgaaatcagaatctgtgggtttttacacagtctgcctcctcactggagtctcagtttcctcatctgcaaaatggcaatgaaaatgtctactccacaaaattgtgattattaaacatggtaaaataaatgaaaatcattataaaatacggaaacataaaataaaatatgaaaaacaaattaaaatagaacagtgccattcaatagaaatatgaggggaaccacgaacgtgagccacatctgttattttaaattaaaaaatacaaagaagcaagtgaaattaataatatattttattttgcccaatttatccaaaatattgtcatttcaacatgttaatataaaataattaataattgaggttttttccttttttttttgcactgtctgacagttggtgcctgttggacactcacagtgcagctccgtttagactagccacacttcaggtactaaacggccacagtagttagtgactatcatagtggacagcacacgcttagaaccaaggtgtatgtttattagatctaaatagtattttctatcagataaaccctgtgggacttaagaaggttattttttaaattgatgcattaaagagagtttgtgtttttatatttttggtatagtagttaatatgtgatctataataagaatttaaaataaaatattacctataactgatcagaccatgtatttatccaaaataaaagcaaccaaaagtgatgattacaggtaactttgtagttattttattaggacttaaattatatattaatttgacataaaatctaataatctcaaaaaaaaccctgacataactataagcacacaaaacaattcaaactataaacaattcaaactggcatttctgtagagaaggaaagggtcctggagttggaattccaagtctttagtaataaactacaattgataaagtgtacctttcggcaaagaaacatgaggagaaaacacaatatttttctatattgcaaaacttttcatttcacaggacctgccattagtaagtcatattatagtttcaatagctttatttttttctctcataaaaatttattctctaaataataggataaccacctattatgacaattatatacagcatcattttaatgcatcttaatgatgcattggggttaaaatgtcaaatattatttacattatactcattaaaattacactgaatagtatatggtaggcaaattcatgtatcttgagttcaaagagtaggatgaaaaatatacagaaaacatttcttcactgcaaggtctttatgaaagctgtccacaaagcataaggtgcatgtgtgtgcacacatatgtatttatatattgagtattatgttcttgttttctgtgtgtagagatgtccctgcaactggcatattttcagcaatcttcctctgggctgaccagcagtgcaacacaagtggtcagaaacgatacgagagtaaaatgtagtatgagaaaggcgatggctacttcatttcaaatctgacaaggactatttagttacctactacgacttccacattacaaagggttattaaattcttaatgactgaaagaaactttttggactttgattttttatttacttgtattcagaagatggcactcctacaatacaggccctcaaacactttgtcagctcactcggccaaaagtgatacataaagaaaaagtgccatagcagactcgttaattcttcgttcagggagccacctatgtgtgtgtctctgcagtctcctcactaagaacttgcctcacccagccctgctcaggcttaagatcagcaatgggttcacactacaaatccataaagcttcaaaagacagggtttaggtttatatcatcatatttatattcacttaaactcttccaaggaagaatctattccatcattagggcatgcatttcctaaacattaacatttgttaaaatgctgacaccccccatagccactgataccaaatgcaaacacaatggcaaacactgtacaattttaaacacttggccaaacttcagaagtaaaacaacccactgtagtaagaaagactcacatctggcatttctgtagagaaggaaagggtcctggagttggaaatccaagtctttagtaataggttctgtcctattttccatgctcagcctattcataatggtgaatccatgctttggagaagcagacctaaaaatcacaaggagtcagggggaaatcaatagacaaattgcttagtatgctatattttcagtataagtacattctgatgtgtctctcaacctttgtttgtatatgcagctttatataagcagcctgtacacgtacttcttcaccactggcatcattatggactaattcccatgtaatgcagcagcactggcatgatgattcatttggtaaaattgagtcatacttcatttgtggtgtgtgtgtgtgtgtgtgtgtgtgtgtgtatacagatgttgtttatttcttaacctaacgttgtaaattcctttaaggcagagtaactactttttaaaacattactgacttttaaagaatactttttaaaagttaaattaattaaagatattttaaacaatcttggtagttaatattagagtgtacatcacaattatatgaagaaaattttcatagaaaattttaagtgttagtctgaaattgaagcctgcaaaatctcttagtgatatgaagcaactctgaacaatgaacttgtgaggacacagcctgaactagaagtttacataacagtgcaaagggcagatactttgttttcttcaatgcaaagcaaacagcttcacagataaaccactataagtttttctctataaaaatgtgacatttagtgatgttttattttcatttcactcaataaaccttgaatgcctgctctgccaggcagaaagaatccaaattatactgagtataaactctaacaactacatgtgcattcatctacccttgggtgacagccatatagtaattcaactgcgcaacttccggtgacaaatgaaacaccacatacttacacactgaagctgaagcaagcagaattcatttatttactttaaatgagggtgctagggctgttattaacaaacccacagaaatgttatgagcaacaggaagacaagttgtttatgtcttagttttattttacctctatttgatactgatcaaggaacacagctacataaccactaccaggattttcttctgaaacctccaattttaaaattgatgggaggcaatccttgcctagcttattttacaaaggggtaaagtggtggtaagcatacaatcaataccagaaataatcatgatcatcacttcaacttaaattcagaggaagaatgaaaatgtactcccaaagagctctgttaggggtcttctggaactgtcaagttcagaaatcaccagtgggtgtctctatgaactctctattacagaaaggaaggcatgggaggaaataaatgattttttaaatgggattaagtgttttcatacaagaatgagaatttgattctgcatgtatttcattatcacaacaggatctcacctctttaatagtacagctactatagcatctcataatttagaaaataggcccaggggataaatgtgccaactgctctaaagcaacttctgtaagagaagtcaaaataaatcactgccagctccattccctgtaacaagcctcccaccccccacccaccatgagttttacatgctttttgtaattcgctactgaagaaagccttcaacattctaggatctgggaggtttttgttttgcaggggataagggaggcatcccattcttgaggagttagatttggagaaaagactaaaaaacagcaaaggatttttttctcaatttaatgttttgtttaattgagagttccattagagacttagagtatagtaagaaatccttgaaaatacaaacttatatttggtctggatgtacaaaagaaaatatttgtatgatttgttcctcttccatagttaaaaaaaaaccctactaaaaattccccaaatcaatcattaatacttactaatacatcttttctgtcacttctccaaagaatcataatgcgtgttgtgagagatgagtgagaacgcaccctgtgtgcatggcacatagtacagtgcaaccctatggcttttgttgtaaacttcagaatcctcaagagtgctcatactctacccaataaacttgcctgggggcatgctctggtgctctggatgtttgggagcataatgtagactcatataccaacggttcttgggtactccactgctcttctgagactgtgaagaacctgacctccttgtcaccaagtgtgctggccttgcctcccattccttccttccacctcccattgttgcctccactggaacagaccttcctcccctgcagctgagctccctcctgcccagcatacacagacctccatcatgcccacactttgccccaaatgggcctctctgtgctgttctagtcctgcttttatctttccagctgactcatctgtatccttgctggccctcaaacctaaccataaaccctcatcggttcctctttatactcactccttcagggaacagcttttatttcatggtttcaactaccaaattacttcagacaactctaaaccatctccagccctgcccttactctgaggggctggccacctccacccaagtgtcctgctaccagttccaaatcattacttcaaagtaaaatgagggctgatcctcaagccacattcttgacctcctgtctttcttttccaccaatgcttctgtcattctcaatcttccatgttcaaaatattgtcatttttaaaatttcaccattgcaataccctttccatttcaatttctattattctaatcccaactctcatcatttcatatctaccccactgcaataatcttctcactgtcctgactccaatttcttccagaactagtgcgtccccatgaagtgaatacactgactttccccatacattttctctattactctcctgttcataagccttcaataacttcctactgctaagaaaataatctcaaaatccagagtctgccattccaagctagcaaatctctttacacttgctaactactataaaccagtataagccctctgcaccacatctccctcactgtccctttaacacaccaggttctccgcccctgcttttgccattcttcctgttgagactgccttccctctcctctatgcaagctaagttccaccatattcctgaggcccaattcaagacacatcactctataaagcaggggtgtccaatcttttggccttcctgggacaccttggaaagggaagaattgtcttgggccacacataaaatacactaataatagctgatgagctaaaaaaaaaaaaaaaaaaaaaaaaaaaaaaaaaaaaaaacaacaaactcttctaatgttttaaagaagtttacgaatttctgtcaggctacattcaaagccatcttgggccacgtgtcctatgggccgtgggttggacaagcttgcgataaagccttccatgatcacagcagcccattcattgctcagaatctatccactggcacttaggatactctatcctgtattgtggcttaccataaacatgaatatatgtggaaagaaaatacacttgtgtgtgtgtatttcctgtctccccagtgaaacagatacccctagaaaggtttatattaggtcttttaatttcatctttgtaccctcattgaaggtgatgacctttggctatgacattttatgtgaatgtttatgtgaatgaaaagtttatttattgagccaatatacataatgtatgtctctatatgcactcgtaatttgatattaatatctgataacaagaaatgactaaaaacatgagtttattaaatctatcctgaaacatattctattgactagacaatggaggactgaaagacatcttcaattttggatcatgcttttttaaagagtcaggggtgggagaaaagtgatcaacagccaggtgcggtggctcacgcctgtaatcccagcactttaggaggccaaggcgggtggatcacgaggtcaggagtttgagaccagcctgaccaacatggtgaaacctccgttgctactaaaaattagctgggcgtggtggcgcatgcctgtaatcccagctactcagaaggctgaggcaggagaatcacttgaactcaggaggcagaggttgcagcaagccaagagctgtgatcgtgccactgcactccagccttggtgacagagcgagactccatctcaaaaaaaagaaaaatgatcaatgaaacccttttccaaatattaactgaacaatctagtatttctgatagtgttcttctagctccttgccaatgcattatattcaagaactttgtgccattcacttgaatcaaagaatatttaatctattttaaacagtgcccagtcaatgatttaagttcatctacattgaagtttaaattatattctgaaattagtattcatcacgatataccaggtgacattatttggtattcccttcttcgtgtcaactaataatttcaaaactgagatttaattcttttacttctttttgaaataaaactgcatgcacttgaagaagagtgacacaacggagctaaaatattattttgaagattagtttctttataaaagtgaaacactcttaccttgtataaacaaataaggttccttccacatcagttttctcctaaacaataaaaacaaaacacacaagacatgtatgttctcttcaattcacaaaggtataaaacaaattctcatagaataggaattatatataacttcaatgggccaaatatacccaacatgaggagttattctcaggaaaaggagaaagcaagttctatgtcatcattgtgcctctgcagattaggcagcaggaagcagtctttcttttgtcatttataaaacaaatcatcattatctctctttaccaaatacagggatagcagcatacccttagctgaaacaatgagaaaataagtgtgctatgcggatttaattagaaagaagagtgctgcctttttctccttccaccacactgggtatagagaaagctgcagacatcactggtgtctgcatttcactatccttcattttgttttctgggttcattttctcctgccatatccagtgacttaggagagcagatgatctgtcaataactttactttgactgctagacagagagggcaatgatgccacagagttctcagatgaatcaatcacctacttagtgtagtatatttacagtcaaggtctgacccgagatcactgaagtaaagttacacaagtattaccaagttaggactcaagaaatctgcctgagaaaatctgggagaggtggtaaagttaaaatgatggtttaactaggtcacttcacatttcttttccatttctccaaaggcaggaagctaggccattataatattcatccatataatgcatactaaaaaacacacatgtaagtatccaggtgtttgactaaccacgaaccagacctactgtaattcagaatttaaaatgtacttttgcaatttacatggtttaatttcagcattctatttaaacccctgatattttattattaatattcatcaccataatcattcaaaatttaagtactctgtaattctggtgaaaaatacgcccttttaaaaaaagcgtaatgtcaaaacagcagtttttaaaaggcacacaaggcatgatcctttcacatgctcaggcaatttcagcaaatttctcattcactttagttcagtgggtctcaaagtgttatccccagatcagcggcatcagcgtcacctgggaacttattagaaatgcaagctcttgggctcctgcccaaacctactgaatcagaaactctggggatggtgctcagcaatctgggttttattaaactgtccaggtgattctgatgtatgctagtttgagagccactcactgccttagttcaacaacatactctctgcccatgaaattatattacaagtcctgaaaacaaaatccattatggcacaaatcatatcaagctattatcaagagtaaatggctataaaaaatcattacctagtaacaaaatatttaatctcaagatgtttattattatggaatatgaaattataaataaagaatttagaccaggcacagtggctcatgtctgtaatcccagcactctgggaggctgaggcaggcaggaggatcgcttgtggccaggagttcagtttgagaccagcctgggcaacatagtgagaccttgcctctacaaaacaaaaatttttttaattagccaggtgtggtggcacatgccggtagtctcagctactcaggaggctgaggagggaggattgcttcagcccaggagtttgaggctacagtgagctatgattgtacctctgcattccagcctgggcaacagagggagaccctgtttcttataaataaataaataaataacaattaaaacaactttagccagttttttccctaacataaaagcataggtaagtcagggagttcatccttaaactagattcactatgaagtttgtataaatcaccacaacatactgtgaaacatatccttatttctgaaatgtggctcgtttgcccctgtactttgaaaaatatccaagtcaaaatgaaaaaatatatatacagaaacattacttatctttctttgaaaacaaacatggttaattcctatctgctgacaaatgtatatcctgagtgtacctgaagcactaagaattacttacacccaaaccaccaaagtattaatcaggaaaatggcccctacagtacagtaaatgctacctgaacagtatacaaatttttggctgtccctaaagtttaactgattcagtcagcaagtattcacaagtccacaaagcatttaaaaataaatttgtagaaagtatttggtattatccattacattgttaggaaactgagccaagatacaggtgatagaactaggactttgcagaacctctatgtagtcaggatcactccccacaagatcaaaacactctcctggtcttccagtatctgaccttggactgtttcatcttagagatctgaataaggatatctatatatatcagcacacataaaactaaatagcttctgacttgtttcctttcttccttgatgtaacagaaattctcttttcttaattaaaaaaaaaaaacctttaatgccacattttagtttttaaattccaaggtcaaaaatgtaaaaggcatgcttctcctaaaattaatctctaacttataacaagtaattcttaaaactaagatttttatttagcattacacacaaagaatatgagtttgttcataggaaggagttgtgtttcagtaatcacaacctgggacctgtagtggggttcttgccagatcatgctgggctaattagtttattattatatgtctcagtttctccattgaaaagagataaccaggccgggcacaggggctcacgcctgtaaccccagcactttgggaggccgaggcgggtggatcacctgaggtcaggagttcaagaccagcctggccaacatggtgaaaccccgtctctactaaaaatgcaaaaattagccaggagtggtggcaggcgcctgtaatcctggatactctggaggctgaggcaggagaatagcttgaacccaggaggcagaggttgcagtgagccatggtcacgccattgcactccagcctggggaacaagagcgagacttcgtctcaaaaaaaaaaaaaaaagagagataatcagcttacactactcagatcttttgatgaaaaaacgtcaggcgctctatgacacctggataaaagagactttgaaaatatacatttctgttctattacagctgcccaaattcacgcattttcctggcccctccatagttatccaagggcaaccagattttttttttctttctgagcaaagtccagggttagggatgtggagaatagctaaaacaagattagatgttccttagatcctttaaggaggacttttatgtgaaagtattagttaccagtcctggggtattttagcttaaattttaaaagtacaatttgaggatttaatattatactgtattataaaatctaacaagtgctaaagaaataagcaattcagaattcaaaatactaaaaaacccaaaatggaatataaaatagtgctgttttgcaaattttggggactctgcacactgtctgacacaaactagctcaacgcaatctctattttaacttgattattctcagttaaaataatcaaaaagtaggtctcaacttatcctcccaaatctctcttcatcatgcatgtagcacgtgagtcacctatgaggctttcaacaatatgaaatgcctgggtctcattatccagaggttttagtttggcatttttcacttttaaaaaactctgacttatttggatacaccaaaaacttagaaaaccactagctaggaacacaacgttagtcactttagggcagttttcaggctcagcattccctggcctctactctatagatgtcacaacactcttcccttcagtgtgacaaccaaaaacgtctccagacactgccaaatgtcacctgggggcaaaatcaactccagctgagagccactggtctaaggactgacagctggaaaataccagggttatggtcttcaattgacacataggtattaatattttggaggcggggggcagtctttcctggcaacagggagtaggtctaactctaaaattcctattccagtcatcacataatctttcttaatccttctttaaagcagttcattttctagacacctttccttcctaatttctcctcctttgaaaggctgaagtcattcttcatccattttcagggcaataagaattcccctccttaagatcccccctgccttcttgtaaatactttctcctctattctcaacaatgttctcatattcttattaggtttacattcaaacggctcccatccacagtgacagcacatggagacagtggtcataattagtttgcctccagcaactgctctgcagttgaactaggtctctctgtttttctggctaccacagccttgaagattagaactttgaaagaatgaccttttcctgaatgaattatgccctgtctgaaggcaacatatccagcaagcaggaaaacataactcctgtaattaatgcattgtgacacatctgctttttgatgaggctttaggtatctaataaacatctgtaactatcttaaaaaggtatctatcacattgataagggtcaaaagcctataggaaacaactattattcaagagaaatgctctactctctttatactgacagtttcttgggattctccagactcgaatcccagtgtcaagtcaacttacagaactatacatccctggtcctcatctctctactacggaattacttttacaggattataacattatacctttagcatttttctacagagcagcaaaatagccatatgtagaatatctttttatatatttttaattaccatggaggaaactgtctatgttgctcaatgttctttatgtaaaaacgaaggtgacacctcgaaaaaacaaacaaacaaaaacaaacaaaaaaagtaggtgacaaattcccctggaaactagggggaaataacctctttctcctgatcaagaggtacactttctattacagaagaacgaatattaaagagctcttcctgttctccttttgtgtttggctactaggagagcagacctaaattctttgccccattccggcaaatttcctccgttaagaactttgggcaaaactgtttgtctaccccattcttgcttgtctttttatttttatgttaatgattttcaggtgagttttttactacaggctgctgaactatactgcagataagtaggcttatgaatgtgggtgttaaaaaaaatacagagttgttcaacatggatgttttcctagattaagttttgatgtttatacaaccgacttgaagaacacaaaaagtttatctgaaatccattcatcaaggctaagttctccatactgttttgtaacttattttaaaatgatggatatcatgtatgtgatacataatggatgatgaatattatttggacaaaactcattatgagtaaagaaacaaaattacatgtctctacattcgagtgggtgggttacaaaattacaagcagcaatccctgcaacaggattccagtgttctaggcttctaccccattctaactatgaggaaaatgaaatttcattccattaccatttactgggactctgctttgagaagagcactaaaataatttggctcccaaatgacctccaatatcgaacttggtgtgctgccgtgtaataatcttcccaagagcatcagcttccttctaagtgttagaccctgccccattttgtcttttatttgacgaggttggctcttttcttggtgtttccccttaagtttacaacttgcagatttctccccttctatcaagttttgatttctctttgccccatctaagactgacattccaaaatcagaactctgcacttttattcgtctgctgtccctgcctcccccatagccacagattcactgtaacagaactctgctctactttctcgagcacatcggtcttccggccataaggtatcaggtccttcctttccttcggctcttatggtgccgtacccgatcggtctggtctcccagcgttgggtacgttagagatttaagtcttttccccaactccaggtagctccacagatccgccttccttcccccaaacccccgagaccccatctccacaacttcggcctcagtccccagatccacccacttccagggcgtcaacgtctcctccccctcaccgggtcctcaagtcctgagtctgacgccccccgcctccaccccaaccctgggctgcactgctccgccgcgtccgcacgcacccactcgttggcccgatggccgaaggtgtacagagccacctggctggccacgtccacgatgcggttgatataggggtcgtggcgctgcagggccgctaggctgatgtcgcgcccctttcccaccaggccgcctgccgccacggctgccatcttccctccctcccagacataggcacggggctcttggaagccactctcaatagatcgcagaacgagcgagctgcctcgcaaccgagaacccacggcgaccacacggcccgggaggccttccggctccagtcacccccaccctcctgcccgccgacagacgcaaggcctcactaatcgatggccgcgccccgcccactgaggatcgttgccactggcaacgacaagcccaggcctgccctctgcatcccgtttctttctccaagagctgtttttctacgcgctcgagcctttgagctgtgtgtgcggtaggatttccttcttggatgtgttcgaccccttggcatatcttttctttggcgcttcagtgatcaaatctatcacaataaataagcctcgagcatcaagaactctgaagagaaagagaactgaattgatttctgaatgcgctaacacccagtggttctcaaagtgtggtgtggtcctggaaccctttgggagtttctgagaccctttcaggggatctgcaaggtcaaaaaaaaaacaaaaccttttatgacaatgctgagacttacttatttgacttgttcactgtggtgacgttttgcagacaatggtggttaaaagcgccggtggtttaacccaatcaaggcaggggcaccaaactgtattgctagtcaaagtacgcgtcactaatctgcactctcagttacaaaagaaaaaaaaaaaaagaagaaggtagagagccagtgtcacctgatggtgttcttgataagcagtaagaattattaatttcattgaagcttaatccttgggtacaattctttttaacattctgcatgaaaaaataggaaataggcataaagcacgtctgctgcaaaatgaagtgtgtcatatttgtctctaggaaaatacttctgtgcttgagttgtaggccgaattcatgtttttatttttattttcataaaacatttttacttgaaagaaagatgggcaaactatgattattcaaacaggtacttgacagacatttttctgaaaataaataaagtgtgcctgtcactttcaggaaaacaagggacaattactgctgccaatgataatttttaagccttcaagccagaattaaaagtttagaaaatgtgtatctactgccatgagcttgacatctcagtacttaatgtttttttttctgatgagatcagtgatgatattaatgagcgcaattttaacaaatcttgtataatggaaagtgtcaatatctcaaagatctgcttaactcagtggtccagtattttccaaaagaccaatgtctcatgctacataatcatgcacaggcaaaagatccattcaaggacaaggtggactaatggatttttaatgtaacagtatgaaaagttaataggatttcagatagtacattgcagctaagctttgagaaactccagcttgtcaagttttggtatattatccaagaagaatatccacaattgtctgaaaaactctattaaaatatccatctcttttccaactacattatctacatatgaggccagagtttcttcatatactccaaacaaaacacacatagcccggggtctttaaagttatttttaatttccaatatggtaaatataggtgggtataactcacataaacaaaagttctctgagggagtccttaataatttttaagagtgggccaggtgcggtggctcctgcctgtaatcccagcactttgggaggctgaggcgggcggatcacaaggtcagtagttcaagaccagcctggccaacatggtgaaaccccgtctctactaaaaatacaaaaattagccaggagtggtggcaggtacctgtaatcccggatactcgggaggctgaggcaggagaatcgcttgaacccgggaggcagaggttgcagtgagccgagatcctgccactgcactccagcctgggtgatagagcgagactccatctcaaaaataaaataaataaaaagtaattaaaaaaataatttttaagagtgtaaaggagtcttgagactaaaaagttgagaatggttgatctaaaccatttatctagcattaaatattagaacaactgtgcagacattactactcacattcataaattcttacctatttgatatagaaatatcatagatacggcacacataccctctcataataatatgttgcaatataatctttgcagtcacaatttcaattgtactgaaattcttggttaagctgcattttggagtctcagtcctattgactcccaagcctaacttcccagtggggaagaatacagcaatggctttcaaacaacttttttttgactgaggctggggtcatttgcagtctgactgagaacatatgtttatatatttatacctgatattaactagaataaatgtttcaatactaagtatacagacattttttaaaatgctatttgtgactttgtaaattggtttcatgaccaactaatggattgtgacctgtagtttgaaaaacatagggctgcagcaactgagcaaccacacaaagctgactagacaactttccatgttagttcactacctttttccagtgttactgacctctttgctcttaatcacatatgtgcttctaaaaacaagtttaatctgtaatatgggcaatggagaattttgtgattaattcttgaactagtcacactctctcacttgattagctgttctaattttgatttttcagcatgaacccacagattctactttgcatttccctcgtacatataatgaggcattgtttttcttttgtctgttaagttccatgatccttacacagatcattgtcctcataatttttcagtctttccatctttaaagtgtaaagaatagatcatggcctccaaagaacgaattgctttgagctcattagagaagacaggcaatataggggccattgtaaaagcttaaatgttcataaaacaaaagtgtatacaagtcttagtgatctgtatgactacaattgcaaagcatttatggagtgctcacttgatgaaattcattaattcttcatgatttattattgcttcttgtgtctgtgctgaaattacatggtcatgtcttctccagtctttgatctcactgatgagtaagatgaagatacccttactttgcttacggggaaaatttcacatatgtgaacaacatgctaatatgacccttagtagagaagagttaattttttgtgtgtttagagttaatgaaacaacccatcttctgttctaacctccttgtatctgaactcttttctcccaagtatcttacacattcctatctctgtacctttgcccatctgtcttcttagcttggaatgaccttttcctggaaaactcacctcctgtcttctcccatacaatcctttcagcctatgaatcctcattgcattctgttgcgatttttcttgtggcacttagctcactttatcctgacttagacttatttatttactacgttacatatacatttttttccaattctaaaaaaaaacagtcattgtaataaaagagaattgttatagaaaatctagcctgaaaacattattgcaattgaacaagaaattgggctttgagtttcttgacagataagcaaaaaggaggaaatagtatgtttcataaagttttacttatttatttatttatttatttattttttgagacagggtctttctctgtcgctcaggctggagtgcagtggcacaatcacagctcactgcagacttgacctcctgggttcaagcactcctcccaccccagcctcccaggtagctgggaccacaggctggtgccaccatgcccggccaatgttttttatattttgtagtgatggggtctcactacgttgctcaggatggagatgttatttttcatgttttgtagtgatggggtctcactatgttgctcaggatggagatgttactttttatgttttgtagtgatggggtctcactacgttgctcaggatggagatgttattttttatgtgcttatcaccacgtagtctccctagcacttggtccaatgccttgtacataatagagattcaataaatgcttattcttttgaactaaaccctgagttagttgaatttactcattaaatgtcagcattttttaaagagctcatgatttataaaataatgaaatccaagttgggataaaaaaacgtgcaatagcaagtcctgttctctcagattttatattctaagggagatagaaaaacatggaaaggtttttggttttttaactttcaaacaaaaaactcttgaagattagaaatcatactcagagaaaaaagataaataatgttgcaatgacttcagcattgccatattgttcatctccctggcccacagagatttatttattttttattcttttttcctccccacaaaggcctaaagctctgaccttctaggatgacgccagccttctgccttctttctatttgaataatctgtgtttgtaaaaccaggtcatcatcacttaaccaaatatactaagttgcaggctcgatattagtaaaagaccatttcgaataggcaaattcttttttaatccgtgtaacttccatttctgttggcgcccagagtgctggcgtacttccactgtgtttccataagcctcatgatgataccttggacaaatattggtgacttcgagtttcatgattatattataattgtcattatgagattaaacatatgctcacacttggttttacaaagttggatactgcaatttaaaacaagtttgtagaatgataaaaaaataatgtttgggtctggaatttttataccatggcaatgactgagtaagacaaaattcagcatctaatcaattaaggtaattgtaagaagacagtatgtttagattctttgaaaatcagaatataactgaaaactggttttgtaggcatgaatgaatgtttgcatacaaatatagattgactatatcatcacaattttaaaacacaaatacacagtctgctttattagtactcttttctttgttgtgtaaataccctctaagtctggcatttgtcctgtagtagaatatgttagaatggagaggaagagaggagctttcaggatgcccctaagaatttgtgattctgagatgacttagcctctgatgctatgcttttgccatctgtatgagttgccctttttttgctaggaattttattccaaaggatgatagaagtgaacaattaactctctctccctgtggaggagaacagtttgaagcagtgtgttatcagttgttttcaatgcatggttcatttatgttttaagcagcagagcacagtaggaagggcaccccctcctggaaagggaaactagtttcacctctttctatctacgtgaccttcaacaaatgacctcacctataccctggggaacataatatttgctctaccaatttcactgggtaaatgagatcaagtgagaaaatgtaccagaaaaagctttgcaatctgtacaatgtactgcaaatagaaaaaaaacccaaaaaactattacaattagtagtagtaagagtatcactatcttcatcatcattattattagtttcatgaccagtattattctttctaatagaagcccagaagcgatacttttaatccaattacccaattagtgttcaaatcaaaaaaattctgcataagtgacaaagaatatgttaattcccagggcagcacattcccaatatttttatacgctaaaggatgcaagttaaaacatatttatcagaaacttcacagaggaagataaaatataggagacatagctctttgttctgcagggttatacaaaaggttaagatttgaaacaattgtttgagagccagagcagaatgagaaggggcagataatggggtgaagactggggaatgtggggaaggcagacatctaccagggggggcttttgctagggtaagaggtaacctgtacctttgaaaaagtcagaaattctccagtctgggccttatagctccctggactagacctctcttaacttgacctggagggggactggggtaattagagctttttggagtggagagatcactcttgaattgaccactctctttgcttctctctgccagtcccatgaaatctattaatttactgtcactgtcaggagtcaggtgaaagctcagtgggtctagaggatctctacaatagctacaccttttgatttgcttctttgtatttctgggcatcaccctaagatatgaggaagcacctttaattccacatgaagagatcattggcttaaaatgcaaagacctgatagtgctacccaacgtccacgagtctcaaagtaatcagtcatttgattatcaacagggagaaaaagatgttaagaaagaggaagtagaggtcgggcacggtggctcacgcctgtaatctcagcactttgggaggccgagatgagcggatcacctgacgtcaggagttcgagaccagcctggccaacatagcaaaaccctgtctctactaaaaatacaaaaaaattagctgggcgtggtggcaggcgtctgtaatcccagctactcgggaggctgaggcaggagaatcacttgaacccgggaggcagatgttgcagggaaccaagattgcaccactgcactccggcctgggagataagagcgaaactgagtctcaaaaaaaaaaaaaaaaaaaaagaaagggaaaaaggaggaagtagaaactgcagaagacaaatctctgttttattctcagtgtaccatggaaaggacaatggaagttgctggccatgcctctgaaaacacaggcagctctgtgtcacattattgaggaagatgatattggatgtggctgatttcacatacaggagccttgtcctgggacatggaggagtgttgagggtggtcaccagattgcctttcccattaactaggtgtgcactagctgattcattatcatagcgctaaggtcatagagggatgacccgaatgattatctgctttgagcaaagaacccacagttctgggcaagtcacttcacttctctgtgtaataaagagattgaattagaagagtgctacgcagctacggattctgtggttctctattaagctacctcggttcatatcaaatgcgtatcaaatctttacaaacatgtagaaaagcccagaaacaatactgaacaatatgtttagggaaacatctcacattgaaattaggtcaggaaagcagcccattaaagactttttaacgttaaatcaaaactaagggccgaaaagcctttcttcttccatttgttgtgttccctcatgctcgaaggaaagctgttgttgtggggagaaaggaatgtttccccttgccatcctgtaggtggcttcctgccagggtggatgggctctcgctgtagattgctaatccaggtgaaatgagtatttcaaatcacctgtgatgatttgcatggcagtctgtaagaagcagttgggaaagagtgtcagagcctccttggtggaatgcatttgaagaattttgtaattacttattgttcttacaacctactatgttaccttttcaccttgtcattgatttttctctttttaaactgatgtatgaagccccaaaggtaattgaactgcaaaatattgtgctaaactaaccttaagtccaagatgagaggctttggaaaaatacttggcttggtcaggagctagaactctaatagtggggactagggggtagagggatgaaggggaggtatagtatctacttctataatgctgagatttaagaatatttccttacccggtccctcaagcctatcataaatattctatattgggttgacaaattacagctcacaggctaaatctggccctctgcctgtcgtgtaaataaaattttgtttgaacacagccatgctcactggattgtctatggctgtttgcaccttgcaacagcagagttgagtagttgcaacagagaccatgtgatctgcaaagcctaaaatatttactatctagtcctttacagaaaaaggcttttggcctgtattatttaaacaaatccatacgtgagttatactgaggactctctacatgctcagtaggcacccagtttgtgcacattgtaaatacacaatagattggaagcccagtttctattctcaaggaatttaaaatctagttgaggagacaaagactagcatacatgaaaaaatgtgaacagtaaaatacagtgtataatcaagggttcagctgtgatgtacaggcaagtaccagaatttggagaaaaggaaggaggatcagtgagacctctagtagttggggaaagcaatatttagtataaaaagttccaggacacaataagagcttggatgctcccttgagatccattgtaattggatgtgacctgtatttctactccagtgtcatttaaatcactgttatttttggccttgtgcttagaggacacctaaatgaccagaaatatttctgagtgactttagctgactgatttttctgggatttgggattccttcaatctccctaaactacagaaaattaaacctagccatagtggcataatgtctttctcttttggagacaatacagcaaaatgattgcaagcatgagctctgcagtcaaagaaacccgtctcaatctccctctagctgtgtaaacttggggagactctaaagctctgggcctcagtttcttcatctataaaatagagacaacaatagtggtaacctgctagcgttactgtgacaactagataatataatgcctgtgacgtgtttagaatataaagtgcctgcctggtatgaagctaggtctccatgagtgtttagtcattggcccttgctcctgagaatagcaagatttatatcctgcacaaaagagtcatacttagttccagaacaaaaattagtactttatcatttataaaggcacttataacaaaatgtactaatgtaaagcaaagaattactgctcctcattttttggtttactaatggttataatttttaatttttaacaaattgccattgccaggcccctgatttatttctgtgatgtccttggggatcttgggaccaggagcatgatgcaaaaaacacagatacagatctctgctctgatactaatgcaggaatcttgggtgttttcaggacctgttgtgactgtctttggaggtaaggcagagggcagtggtaccagccttgtgggctggaaggcagcatctgtaggttctcacccatttctgtgggtatggaagaaattacgtagaatccagaccagtttttcttatctctaataaggagataatgttataacatttatttttgtgcttgttgtgagtattgctgaaagagctcttagaaacactttaagtgttttgatgtaatcataaaatatgaggctttagaagtagggtttgagcatccacagaaggctctgttttctctgtggataatgtctgatgataacattgttttctgttttccttgaggtaatttgaagattaaagggaagggtgttttccacatttcctgttggtaataaatagccctctcccagtgctttgaccttcccctgctgctatggagactcctaggagcagtgaccaggactgcagccagccaggcccgtgttattaacagggctggctccgtgggccttcagtattagtgtatttataaacaaccccaaacactgaaaccactgtttggttttgttcgcttttattaaaaattatatggactttagaagaaaacaacaaactgtcagaaaaataggcatcttttttttttttaacccaaataagcctgtgtttagtctataatgggagagttcttataataagcatagcaactcatggctcagcactttcccatggagtaggtagcaagtattgcttattcgcttatgagataacctttacatttaatcacttgtccattcaatgaatatttatgaagctcttaccatgagacaggcaccgggctaggagctgggaatattgcagtgaacaagacaggcacattccctgccttcctagaacttagagtctcacggggaaaatggacacataagcaggtaatcaaaataaagtgcgttgagtgtgaaaagtttgggatgctatgggagcatggcagaggcccaagagaggctccagtttctttacatgaattgccaagtgtatcgacctgaagacactgtacctcctgtctttgtgcctagaccagggtagaatggtcctaagagttagaggctggtctcagttattcttggacataagacttttctggttggcttgagctttaggccttacagaggagccagagacttgtctgggtagtgccataggtgtcatgctaaagccaccttgtccccactggccttggagctagtcagactcagagcctcccaagagcactgggaatgggagcaatcccttcctgctcacggactggcaggtcttggcccagggattcacctatgcaaatagtatatccttgagccaccagtagtttttacctgctcagctttctcctgttctccttcttggagtttcctttcccaagaaaacagactggatcttctgcttctccaaacccatccctctgaggcagggctgagaagaccatgttgctctatgaaagggctagtttaccagtcaggggactctgcttctgtactctctctccctttacctggtgccgaaagaccatcctcaattagggctgacaaggggcacccgttgggctacatttatcctccttattcttaagaagctacagcttttacttgctgtacagcatctaacaaaataagactgtgttagcttatcccagccccaagttttctgtagtggaggctgaaaacttcaggggaaagctgtctggagtcagatgtggagagtctaggagtcccctgtttgccagggcctaaggtgggaagtggagcaagggcagggataatttgtaggcattcaagctagaattattgccaagataggtggcttcagccacctctttgtacagaagagactgaagcacagagaagtggcttttgggaggatacaatggcatagagtagagagagcctagggcgaaagttctcaaccctggccacactttaaaattgctggaaggcatttaaaaagaagccccatggccagggctcatccagaggagttaataggattctgaagttgggccctggtcagtctcaaagtgattcaaacagcaggcagaatggagaaccactggacagcctggttggcagcctctgcacttcctgggttcagatctctctcagctagtatggtacttgggcagttcacctgtcctaggtaaacctcagcttccttctcaataaaatgaggttgctaatcatatctatttggtaagattatttttgaggattaaacaagaaaatacaaataaagtacctgggacatatcaagcacttaataaatacaaatcactgactttgttatttggtaatgacagaacaggactagacttcaggtctccgatttccaggcaatgctctttctaccaggaggatttatcaaggcttataatgaccaattcagtgggaaatggggtgctccatctttaaaataattacctttattcaaaaagacatgaatgacttcatttcttagttcggtgtctcctggttgaaatcattcatatatttgttcatttgtttgttctttgatttgacaaacatttcctgagtgtcttattaggtgccaagtacttatcaggtcccgagtactgtcaaacaacagtactcagtacaacaaaatacatcagtacaacaaaataaatacagaccctgccttccaggagcttaaagtttaatggaggagatacactaaaactaactattgtacaatgtatcaatgtattgattgtgacaatgggtttgtttaaaacatttttctttttcttttttttttgagacgaagttttactcttgttgcccaggctggagtgcaatggcacgattttggctcactgcaacctcctcctcccggggtcaagcaattctcctgcctcagcctctcgagtagttgggattacaggtgctgccaccacgcctggctaattttttgtatttttagtagagacagggtttcaccatgttggccaggctggtctcaaactcctgatctcaggtgatccgctcctctcagcctcccaaagtgctgagattacaggcgtgagccaccatgcccatctgtttaaaacatttctgagaacagtacctgatctaccaggcaatctgggtcaccaaaatcctaatatagttttggtattacctaaggtgccagacactggctttacccacagacattctgatttaattgatgtaggacgtggcctgggcattgagtttctttaaagctcccaggtaattataatgtgcctccaagtttgggaagcactggtttagaagcttcctgttccttaaggatatagccaactctggaaaaacaggctggcgctgggtggttaggagtcttctgggaccacgtttggactttgggaatttggagtttattctctaggcaatgaagtacaatgaaaagtctttaaaaggggaagtgacatcaaagtttcagaaaggtaattctggctacaatttagaaaattggaaaggctggacacagggtaattgttaggaggaagagatgacaccgagggcctacatgagactgggatggtggcactctgatgctaggtagcagcggaaaccctggcacacgggtggaaaaagagtaagcaactaaaaatgttctgcttctgctggttttcagctttgaaatttaattgtggcctcgttagtaatcatataaagaattccgttagtactttttagcttggctgtaaatggggacagccccttcaagaacgctcaagcatttatgggtttcagaatgatacaagataactgatcacccttaaaaaataaaagaactcagttagcttttacagctacccagttaattttggtaatgtagatcattaagcttccagatagagtttttcacagggagtgaggggagaagagatggtctggctacttaggatccaattacctggataattgccagatacccactaaacatggtgatgtaagcatggtttcagtcaatgtatcttttttctgttttttttttttctgacctaatgcctctactgataaaaatatttttactattattggttctgtggaactagtatgactgtgatagtgagaggactgcattccatttgccttgtgctccatcagagtcagctgtcggtgtgtcctcatgccagactcattgtaattaggaaggagacagaagaggcaagaagagcccagcgggaggctcccattttggcttgaaggcagtagcaccacaaattagaaaaaccattgcttgccttctacacggactcaacacaatactattgtgtctaccaatgggaggttctgaatatttttttaaaacctttgaaaacataaaaaccattcttagctcaagggacacaggaaaacaggccacaggccagaggttgcagacgcgtggtctaaacaattaacagaacaataaatcaagcccggatatgtcacatttgctgacctccctgttgtaaatactctcacaatgacttgattcgagaatgtccacgtaaacactgctgcgaggggagctagggagagttgagcagtggtttaccgtggtgtgctctttccaccacgcggatagcataggctgacatgtatgataagcaaccttgagagcaaagggaatggtaaaatgtggtaaaataattaggaaggaaggagtttttgagtatttattctctttgtttctaatataatttatttagttgtaagttcacataattcggtttttatactggccatgttgaacaatcggctggcaaaatttctgaaaatttaacaatattctctcacaaactagtacaagctggctccagtacaccacggctggagaggggaagctagaatgttgagaggcagtcaggatgaaagcaacagagcaaggaaagctgaagtttatggctgtggacgagcgcttcctccatcagctgagatggagccatgcgtgggcgttgcacagggcagcagccaatgatgggacggagctcattcaggccctctgtcttaataagcacaactcaactaatttgggaagaaaactcagttcagttggccagtacctggcagggacaggtagcttgacttaatatatagtaaatctaattataaaaatatagtactgtgctcaaaatttacatgtgagtagaatgatcgtgatgaaacagaagacagaacttttcccttacgataacattggattttctttcctaacctagctctcctacaaacatgcaaataaactgaaccagctaaagaagtggtcccaaggttttaataaaaaaaacatttaacccttccctaaatattatctaatgagggagcaaaatgtgtcactctcccttaacagatgggattctcatggctgctgttaaaggggaaaaaggagaaaccaaactgggtgactctctgagttacatctttggctctgaactcggtgagtctatggtttgataggttggcagggcaaagggaaaaacagagttggagctgactgaggattagaaatggaatctggggctgggtacagtggctcacacctgtaatcctgaccctttgggaggttgaggtgggaggatcatttgagcccagaagttcaagaccagcctgggcaacatagtgagatcccatcactacaaaaaatttttaaaaagtagctgggtgttgtggcacgtgcctgtagtcccagccactcaggaggctgaggcagatcacttgagcccaggagtgcaaggctgcagtgagcaatgattacgccactgcactctagcctaggccacaaagcaagaccctgtatctaaaataaacataacaaagaaagaaaagaaagggagggagggagggagggaggaaggaaggaaggaaggaaaagaaaggaaggaaggaaagaaggaaggaaggaaggaaagaaaagaaagagagagagaaagaaagagaaggaaagaaagaagaaagaaaaagaaagaaagaaaaagaaaatctagatggcttctaatgtaacatggtatttttgtgagaggatactgttaactatagcaatcatttgatttgctcacagattgatttagtttttagtgtccataatatgttaagtatttttaaatatgaaatatgtacctacatgtatttaatatttaccacttaattgaatcctgaagatatcagtggtagatggtttatgtttctgtttatttctcatgtttttaaactttctgcagggaggaaccatttgttaaatttctttttatgtttcttactatgcagcattgcaccatgaatatggagagtgagctttaaaatagtatgaaagacaaatgtttaaaggtatacatttctttcagagaactttttctctctctttctctctctgacagtgtgtgtgtatctcctgtgtctctctttccctctctcacatgcacacataagtgcacacacacacttctcttggaaactgaaggaggcaagaatatgatgccattaacaaatgctctttggtggacagcaataataacaactgctaactttcactgaggactacttatgtgccagataccatgtgaagcgctttgcttgtattagatcatcgaaacctcagaaaaactctataaagtgggtgctaatattttctagatttttcagatacaatactgaggatcagggagattgaataagttgtccagtgtcacccctggtagctgagagagctggtttggatgcctagggctgtttgtctccaaacctgtgccttgcacccttagctctggttcctcccctctcatgtcatgtaatcagcacaaatttcctgaagtaaggctgcatgcatataacaagaataaaggaataaaaatagaggatgccgtggaatgggagaaagtggactacttacggcagcagaggagacagtaggaaaggagaactctagatgctgtaaagcttcctgggactataagtacacttggctacaacaaaatggttgagcaggaaagaagggaagacagaagggctgatttggtggagggccatgggaggaataaaattagacatcatagctacagaatagaagcactgaaattgcaccaaatccatagactctcaggagtggaggagatttgaacgccatctgcctaatacataaatttgctctgcatcttgacaaggtggtggttcagcctccttgaatgcccttggccatgaagaactcattagctcctctcaacagatggtgaattagaaagttcttccctgtatggaacccatatttgcctaccagtaacttctgctcagtggccaggaactgacttcttggggccatacatgaaaagtctttcatagaatagtttccagggtaagtaggaaaatatctacacgtcaactatttttccctaatggtaaaattatttctggatactgcgttcacaaatgcttcctaatcactaattatcactcagtacatttcttaatcaactgcctttttgctaggtaataataatagttgataataaccaactgcaaatagctttgcatagatcattttttatgttgtcatttttatcttacagttgaggaagctgaggctcagagagcttaaataacttgctcagggtcacctacactataggcagagcagtcagaatttgctacaggtaatttaaacacagagatagagcactatagtcaatttggtgctgctataccagaaacccgagactgggtaatttataaagacactcatttttgccgggcactatggctcacacctgtaatcccagcactttggggggctgaggtgggtggatcacctgaggtcaggagtttgagaccagcctggccaacatggtgaaaccccgtctctactaaaaatactaaaaataagcagggcgtagtggtaggcacctgtaattccagctactcaggaggctgagacaggagaatcgcttgaacccgggaggtggaggttgcagtgagctgagatcacaccattgcactccagcctgggcaacaagagagaaactccatctaaaaaaaaaaagacatcttttctctcacagttctggaggctgggaagtccaagatctaggcgccagcatctggtgaaggctttcttactgcttctcacatggcagaaggcaagagagagatatgcaagtccttttcatggtggtgttaatccactcatgagagtaaagcctttgcaagctaaacacctctaaaaggctccacctcccaacattattgcattgggggttaagtttccaacacatacgtttcgggggacacagtcagactatcgcaagtacagcaggtctttgaatacatttattgtgttcaacaccttttcattatgacattgatgggaagaaaaaatggattcccagccagggccactgtctaggtggagttggcaagttctccccacatctgtatgggttttcttagcctttcctgtttcctcccacatcccaaagctgtgcacttaggtgaactgctgtattgacagggtcccagcatgagtgagcgtgggtgtgtgtgcgagtgctctatgtgatggaatggcctcctgtccaggattggatcctgctgtgcacactgagctgccaggacaggctctggccacctgagttcaggggaaccggaatacttgggtaaataattatctcatttctgtaatctttcttaaatgtatgtatagctcacatttgtttcaatgtttagtattagaagtgttttggtctttatttagaaatttggggttttgttttggtttggtaatgtttttgtgaccagaaagatgccctaaggaactttttttttttttttttgagacagagtctcaccctcgggggagtgcagtggcacagtcataacttggacctctgggtccaagtggtcctcctgcctcagcctcctgagtagctgggactacaggtgcatgtgactacacccagctaatttttgtattttttgtagagaagggggtctctctatgttgtccagtctggtctcaaactcctgggctcaaatgatcctcccgcctcagcctcccaaagtgttgagattacaggcatgagccacgtcacccagccttaactcttgttcgtatccattagcctacggtaaaatgggttttgttataccaattttgtaatacccttatatcatcatttcacttaaagtgacaattcctgagaacctatcagtggcattaagtgaagacttattgtacttaaataaatcattcattccacctggtataaaaagagaatgctgtggaaggtagagtctacccaggtttagctttgagaacgtgcagcttgtacagtctcccactgagaagggctctgagcctggttttatactctgctgtcacagccttgaaattcttaataagttttgaacagggagccctgtattttcattctgcactgagccccccaaattattaacttgttctgggtctgccattaaaaacgaaagaaaacagtcaagctgacaaatagaacacctgctttggtggtggtgcatcgagtgttctgtcgttctgtaggttcatatgttggagtgaactttagaacccattctctattctgtggcttctggtcttactgccctggacagcctcagtggtcagggatggagtgtagggtgtggagagtggcttcctttcttgtatatttaatgccatgcgtggagaagggctgagttctggcaggaatgcttttacatttttggcttttatcactttctactcctcagacactgtgtctcctgtcacaggaaatttatgggtacattttagtagttgacaggaacaacgagcctccaggatttccccaggagaagcttccacctgccgagtgagaacttcctcctattggctaatgtggaagctctgggctctcctcattatttcctcagcctgtcataaatgccaggaatgcaggtttcacaaaagcaggcagaggtgcgctgttagtaactgttccaggacaagtcatttgggagaggtacttactgtgcttcttggatgtctgcttccagtcatcttagtaagtccagtttgacaaaaatgtgcctttctaagtaaatgcagctcacagcttatggttgccaatgaaaaataaaaaggacagatgtaacatggaagaatgcatagctacccaacaccttcttcagaacaccagggcctgatattatgttttgctgcttaatagacttcattcagattatgaatgccttcaaagtggcagtaagatatcttgaaaagagcactgcaccgggagtcaggaaacctgggtttccacctagtttaatcttcccagattaaggggaggagttgaattaggcaatagctaagccctgcacttagtacccagtgcagacattgtaggaggctccctcttttgggaattgacagatgttgagcttgggtttccttctcttggctcaaagtgaacaggcttttaatcaatccagagatatttacctagatcttttcatttactgcactgcaagccctgtggcagaatgatatacaggaaaacctgaggctcattatgagaaaattgcataaggggcttctctcctgacttccacgtatggcccaggaatcttggttctgactgtcaggccagctccacctgggccaggtatttatagatgacatccttagatggggaacacagagctagctgctataatagaaacccaaaataacagtgaatttaaggggggtagacatttatttctctctcaagcaatccagggtgtctccatgtcagactcccaggccccttctgtgttgttgctcctgcccacctagagtgttgccctccctgcatggcccatgatggcttcccactgtgttcacagtccaggcagcaggatggaagaaggggagtcaaagccaggttgcacccatctcttttccctctcagcccaacaaccagaactcagtccactgaaaggtaggaaatgcagtctttgttctgggcagccatgtgggagagtggatactggcagacaagtagcaggttctgacatgtggcctgtgtcttgggatttgattaagatgaaccaaagggcctgttgagagcatctgcactctgacctgtcaggagatctctatacactgtaggccacgaacttatatgcaacaaaccacgaagaccaaagcaggctgtggcaccaatcacccatccctcctccaaggagctggtgcagaccctcagctggtgtggccatggctgtggtctctgtgctagtccagtctgggtcttctctgactatcctgcactgttcttgtttggattgctctggagtgccaacttttcttcacagttcttctgattaggtactaaacttcatttatgcatttgtcacagtggaggctccaggcacttatttctggggaaggcaggcttagccttccccacggcctctgcaaagtgctgctctcagttcccttaccctgcgttctctgtctctttgtgcaattctgtggtcgtagtgaaggcgagggggccccttctagtgggaagggtcacttccaacttagattcagactggaaagatgacctccagctgtgcagagacatgttccatggttctgcgttccacagaacatctggaagagctgattccaagcggtggtgtctcagcacagctggggcagtgctgtctgccccctgccatggttgacatccattaggtgagtaccctgggtgttgtggtgtgtgttagagactctagaggtgaatgtggtggtcaccttttcccgttccagctctgcactctctgcagagttgagggccagacaccttcttgttgaggacttagtttactctaagcctccaaaatggttctgggcccattttacttttagcctcccaacacagtttgggccgtcctgttttcctttattctctcacatctcagcctcccaaaatgctgttccatcttctgtcttctgactcaaatcctcttcatcctttgaagactccaataactcctcttggagaagctttcacctaaaataccagccttgggatttttattaccttgtcaattctccccaaatttctttcactggccgagcagagccattaccaatctctattgttcagtatttaacttcacatatttttgtcctcttctcaggttttaaactcctgacttgttttattcatgcatttatcagttatttactaggatttgctaggcacagagcagacaaagacaaataattcccctgtgtagcacttcgctagggtaaccaaggggggaagacatttactggaaacaataacagaacaaattattaccttactagtagacatatgtgcaaaagcctttgaaagaccagaagaaagccaactgcctggcaatgtcggaaagtttcatgggggagctggcattcttattggcctattcagtggtggatggatggaaacagttgctggctggaagaagtatgagtataaatgatcaacaatttgaagaaggtgagagttggaggtctatttatttgggtgggagaaaaggatacaaaagagaaggatggatgaatagaagataaagctgaaaagctgagttgggcaagatgggcaagtacttattggctctgctaaagcttttggattttcctgttggtaacggggagccttgaaaattcttcgggagggaaggtggatggtcccatctgtgtattagaatgatgaggttggatttggagggaaaaattgattggggttgaggagtgagcctcaagtcagatggatcagttagatacaaatttctgccagacaatgacaccagcaaaggtgagaggtgaggagagctctgaattattagcagtggcaatgggtaggaatgaatgaagggaacacatttaagagacactgaaaatgagtaattggatgcgtgggaagttgcagatgctggaagacttcactctgtataaggcaatgtctttttttattcaataaatattggcttttttacactgtgtacaaatggtgtatgcttttctgaacatttgggttttgacacaaacttgtaagactgaaaccatgtgaatattcttcttaaaaaatggattgtaaagatttcatgtgagagtttactgtgtacaagactttgcagtgttgattttcagtctagctggtggtcagattcttttcttatgaagtactattggggaaattttgaggagtacacagtatacattcttggagtacaaaatcaaaatgtgtaccctgttatgttttaaaagaactaaaactacaaaacgatgcttttccttcaggttttgtgggttgaaaaaaaagttagtggagaaatagctttctaattctttcttgccatttcccaaagaaagatactgtgatatttcattaaattaaaatggttatttttttgtttattgtcatcaggctagtaagccagatgatgctggggagcaggggtgtaaagaaaaggaaaatgtttcctggtttaaactctcttccagtgctaaacaagtgctttgccctttgggtggcatataccacccaaatggcagagcaagggggtttaggagaatgtcttttcctttttgcctggtgttgcccataactacataattgtttcttggttaattggttcagatgctacattgtttccaaaggagatcaatctttcttctctccatctctctccttctgtcttccccccatttgttaagctcctttgctttaatgcttaaatgcttaacagtcttatctgctgatccccgcagctcctagatactgaaaataaattatctttatgctgcggctgctattaatatattcctgtttgtcttggcctctgagttatggggagctgtctgccttgaacactgcatcataacaattgtataacctcttccaagcactgcagcaaacttaaatttataaatgcctatgaagtgagaggagagaatggaattgacttgagcgtgggcatttaaagcggaaagtcccttccctggaggctcactctgatctttccagagtgagcatgagggactcactctctccctgacactttttgtccaattattcattgaccaagcttaatgatggggaccagaggaaatatcagtatgaagttttatgaagaattaagtagtactactttgatcaatgtaaaactctaataaataacccagcttagtaattgtagagctatttagagaaaacacacagattgagaattgagcagcttgtctcccaagaggggcccactgggctggtagcatctagcagttaagagggggctgtgtttaggttttggacatccttatccgtccttggtatgatcccctcatgcttcatacctgaaaccttcgcctcctctgcacaaagccatcaatccaaacaaatgtttttgagcaaagtgagcagaatattataagttttcccacagtgttaaagaatgcctaaggatgcagtatttgaatttaaggtttttaggttttattttcaaaagaaactttagaggttttcaaattgtattccacagagttacaagggttccaagacagtgtctcaggagctgcttggggcatggagagcgggtctgcatcctccctcccccatcttgagccagaacaaccccatgcttgtgtattgggtttctaagtgaggcttaatctgaagacagttacattgattaaatcattggaaaactattgatctagtccaacttctcattttatagaggaggatgctgagggccagagagttttataatctgctcaaagtcacaataccagtgaccaagatggatctagaatacagatcttctatcagtccaatgttcttttattatcctatttactattgaattcctccttttatccaggacaagcatggtcctatcagcaccaacgttagaactaaaataaaatacaaaataaaatggatcctgtctatggagaggctgtgacacagagaggttaagcacgtagactctggacctagacttcctgggatcaaatctctactccaccgagtatttcctgtatgatgcagggaatatttctgtatgatgcagggaaccttgtataagttacttaccttcctgtagctctgttttctcgattgtaaaaggctgtgatgatgatgaaataaaccagtgcatatacaaatactgagaacagtgtgtggcaagtagtgaataataaacattagtttttatttaaaagttggaatcatcagtctttctctaagtttccgttagatactctgtagtgtgtcagtccttctgccttctgtgtttggcgctgaggatgaccgtggtcatggatgtgtgttctctcatgtctgttaaaaccgttctcccagaggtaggaggagtaataggatcatagaccatttggactggaggcatgtcttatgttacaagtacctgagtgagaactgaggccccatgagtggaaatgacttgctcagtaatcttaaggggctttttccaaaagggcagggggcagggaaggagagactcctgacacagtcctgggaacctgcattctatcggaaagccagttgtcattcgtggggccaatatgttgatgctgcatttataaatttttaaaaattgaggtgtgattcatttcacataaaattaacctgtgtacaatgtgaaatccagagctatgtaacacatccgcaatatacaccatcaccactaactttttcattagtcccgaaggaaaccctgtacccattaagaagacactccctattcccgcctcacccagggccctggcagccaccgctctgctttctgtctccgtggatttacctattctgtatttttcacagaaatggaatcatgcactaggtgaactttagtgtctggcttctttcacttagcataatgttttcgaggttcatccacattgtagcataaatcaatatttcattcctttttatggcttttacgttgcactttggttaaagaattttgttgcctttgtctctcaccactcccgaagtgaggctaactgactgtgacacagttttctgtttctttccaccccacaacttggtcattagtaaggggctaacactgtggttctattatttacagaaaacttgtttctggtttctcgggtcaggagaccaacagcagagaaagtctagctgctgctatgctggtgggacctgctctgttaggttccctgcctgtcactgctcttgtgcccaggtgtttgtgagggcatgaagaaggaagggacttcaagggctgggcgatttggccccaccatgatacctgggtgttgcacagagcccacatggcagtggagaggctatctcttatcagcacctttgctgtcagcttcttgtcacaacctcaagcctgacaggggaaccacactgataggtgggccctctgggtcttggcaacaatgtcataacgcggattaccagagcaatatgtcacagtgtcattttgcaatgttgaggtgttccatttgttaatgaggtgaatttcttgtctataaacatgaacatctgaactgtagaggagagattaaaaaaataaaatcaccatattaatcaggcccaataattccttttttaagcttggatccaatgctgaggaatctctggcatccttccttggaatcaattacagtcaatttcttcacattttacatcagttaaaggaacattgtcaagataaaatcttgcccaacatagtttttttttttgttttaatttccttactctcataaaccaagaccttcttaggttactttgccaataatgaatttttagagccaaatccctggtttgtctttatttgggctgtgctgaggaagtagcatcttccttccccttggttcacatgttgcagtgggctgctccacggctctcagatgtgcccttggggctgcattttgtccacacaggggcctgtgttctagttccttaggtgcgtgtgaagttgtgtctgccttgctgatggggttatttgtgctaatctttctggagcccgggcacaggccacagcagggcagagatgcctggaaggggtcaggactgggtgccagcatcctcttgggccgtaaagttaggcaggcatgaggccacattccacaggcctgaaggagcagggagcttgggctcagggaacttagttgaggcagaaaggctcaaaagtcacctgaggtgaggcaggtggaagctggagacccagcaacaagttgggaacattacccatgagtttagttcataagacagaggcaagctttgtcctgacatctttgccttctcctttgtcctatgttaggcaagaactcacaggtgtgtgctgctagaaggcaagacaggtctctacaggttcaacttacccataattaaggatggacagcagcctagacctctcagtggtttcctaatgtgagttgctgacaatagattttgttcttttgtagtaaaggcacccagagacttgctgcctaagtgcccatgggcatccttggttcttgcctaccaggcagaccctctcctcctcatccgaattggagggtccaatcactctcttgggggtccaacctggattttgtctttctcagcattgtggtctcagtacggagaaaccaaaactcgtggcactcaagagcttgttcactcttctcttctccaaaccctctggtgtccaagtgagtttggactaagtgggaggccagattcattggcacacaagtggcagcacggtgaatggggggctgtgctgtgttcttcaggctcaaccttccagaagacaatgcgtgcctgtctcctctgctgcattccttgtcccatgtcttttgtttgaacaaaagaggattggataatgagtttcttttttatttccatccttattttctatggacatgaagcttgaaagccagtctccttgggtctctatctctctacctatcctactaccccttaccttagagtaaaggttctgaatgtaaaataaagttattggggagattttaaaattctgatgcccaggctgtatcccaaatcaaattcatggttggattttactatacagtaaggaatgctttgataccattttgaatgtagatggctcagtggctttctttggctttctccaagtcctgctcaatcctcctgagatgccccgagaatactggcctcctgagcaacagtggcaggatctcaggagagagagggcagctgtgggctgtgtcttttcatgagtatgcaatagtcacctttgtttattatttccccaccctggagacaaatgtgttgctctttctgtgtgagtgtgtgtgtgagtgtgtttgtgtgtgtgtgtgtgtgtgtctgtgtgtatgtgtttggaaggggtaagagcagtgtaaccacagctcccatccccatgctgcaaggtagagggaggaggggtggctcacacgtgagtgggagcacggcttgcggcagtctcggtaaccggagggggcgggcatgctctaagggagcaacttggaggagttcctgtggtcccaaacacccatccatctctgcttgagttccttcccagttttaggtgtcatatgagtgcttatatcagtataactcacatcagccttagtgccatggacagtccctaaagtgaacatcaatttctctgtcacctgccgtattttgggtgtaccctaggggcacttagcacacccggccaggaggctcaagcccatgcctgtggatggcacacatagagaatggactctgttgctcttgaaaaggattgttaaaaaatcaagttagcatcttgtttgtcaacgttaagacagttgatgtttcagaataattgacaagcatggaaatccactggaaacaggaatgttattagggccactgtgtttgtgagtgttcggatgtgaattaaaccaatccattacacttgtttgatgttcattggggctgcaatatttttatgcagaacccgtgaaaggagacacagttcagtggtgtttatgagtgaccttgtcttgtcctctgaattatggacaggcagctcagaacatcagcagctggagctaacaactgtgctgtgttttcttcatattccgtattcctgagatgctgctgccatctcgggcttagattttgcagtagagaacatgaatgcggcttttcaaatcagaaatatttatagaacgaggtcctgatttaacaacgctgaagcgctggtcctggaaataataacacaagtcaggaaagagaacctctctccctataaaacatccctccagtgcttgctttcgaggggacttctttgtgaaaaattaatgtttcccagtttgatcagaagggttttaaactgaaggtagggggtggtggagtaaaatgccaggtgagcctatgacactgacaggcagtgcctggttaggtgcagtgatgtagctaacccaccctgggggagttccgctggccattccacttccagaggggaggtgcttgattctccattccttgacgtacaaggaaccctgaggaaggtgtggacaggatgtcccagaacaagtgaagccagtctctgtgtccagctgggtcctctttctggccctgacacagatgcccccatgatgcccgccctctgcaggctcaagtccgcccatgtgctcggccaccacctggcctgcaagtctatcctgggatgctgagggggcagctctggcatccgacaccctggaacccaggacatggatcccattttctctccaaacccaggctatgtttacatcttcaaaacacataaggccgactgtcccttctttcctgaaaaatggagcttcatctccactcctctgggctatatgtctcctggagtctcagagtccttggggcttgggggcattgtgttcagagctttggacatgattcacagtataatcctaaggacaaagtttttctggcaacctcatgctaaaacatgagaaaacaacaacacaacaacaacaacaaaacaacaacaacatcccagctcgctctcatttaaaatcattccccaggtcaaatctccagcaaacatccctctagagaagtgagaataacatagtcaaaatgcccaggaacctcagcagatgcagctgccaataaagttaaagtaaatgtaggcaccgtgaatagatgtctagcattccaaatagaggtggtgagagtttgcctggccctggccatactgccctcgaagacagcttagtgctggcagcatgttccgagagaagcactgacagagaaagacagaggagcatggaagaggatgggagagtggctcatgttctggcctagagaagcaaagattcgtagagaggggaggaagagaatacagtaactgtattgcaacatttattaataataataacgaccacatttttaacatctgctacaccttaggccgttggaacatactaactcattttaatcctcacagcaaccccatgaggtggatatctttattcctattatacagatgatgaaactgaggcttgaagagagcggttcagtgactcgcccaaactcacatgcttagtgtgggaaagttaagattttgccacatccaagtccttttagatccaaggccgtgttcctttttgtaagcctccctggtgtgtggaagggagtacactttctccgtgagatgccagataactgaaagagaactacagggaagatgtcagaggaacgagattccacgcaacctgataaagaacttgctcatggtcagagttgtccagagatgggatgaacaagcccagctggggctgcatttccatccctcggaggtctcaggcagaggctgaggtactaaggttgagggtactgtggtgggtatttaatactaagagtccctcttaatactttctgttttattactctaaagtaaacttccccagcacacagctcaaagagaaggccagtgtaatatgctggttcaatatccgacgactttgaaataattcgagggctaactggctcatctagtgtgatttaagctcgtagtttcccattcatgtatgtactcacttcttcaaaaaacacctttcggagtgcctccttcgtgccaggctctgcagatatagctgtgaataacagatagtccctgtgcaaggaatctatagatgggaatggggagagacaggcagacaggtgattttcattctgtgtgtaaatataattaggaaagtacaggatgctatgggacaccgaatccaactttgcgggacaggggaagaagccttaggagctggcgaggcgagggggtgaagaggagaaggaggtctgggcactggaagcggcacacgtggaaacggtaaaggccgacgccggttcagagccgcaaccgcgacagccccgtcgtccacctcaggtgccggcgccccctgctggtgcgcggagatgcgcggagaccgcaaggcccgggggcgtggcctcccctgcgccggcgcgtgtgcccgggccctccgcggggcgccggcgtctgcgccaaggcacgttctcctgctgctccagaactgccaccttccaagtcctgaaggaggccgttttcctgtcatttgcacctggccggagccattctggatgttttaaggaaacgagaaaaccattctttcctcttaccggatgatgtgcgatgtcatttggaaacaaagaagggctctgtttcttggagcccctgggttctgtctgcaagaggggcagtcatgaggcttgcaaggcagggagtgggtaggatggtgctacaagcggccgggaggtgatggggtgcagggaaatagacatttccatttcttcctcctcccttcttttctccccagaatctcctgtgcgaacctcttctgtgcagacaccttcccacccaacctcaacagagccctgtgggcctcccacgctgtgtaagtgcgcggactcatctgagtgccactaggggacacagcccagattcaagctgggatccccataatatgtgcacctgcagccaggtgtgcctatagaaccacaaatgcgacaggtgaggggatcatcttattattttcctacttccgaggcaggacggtacttaaaccatctcagacagatggttaactgtcctattttaaaatatctctggggaggacgatttcacaattccctgtggctgtctgttctagtatttaatcatgttcattaccagcgagttcttctttatgccggatctaaatctccaccgttgtgatttaagtctttttccttgagggtagacgctgtggctcttctgcttcaggggaggagaggattctggtgctaattttgcggtcttgtgaataagttatctcttgtaacaccttctttggggtttattttctttactggtaaatggggttggagggtgagttagggatggttcccaaggacttctcaaatgtcatagcttttagacaagtgctgcattggtatcgtgtgcaattcaatacttagtggaaataataacgctttgttgcattgaaaagcgtgtagctgaaatctgaaatgatgccacgtagacctagtccagaaagccatctatcccttagtgtctgagtgggccgtgggaaggaatgagcagtggagtgggctgggccactcacagctggaccttccagaagtcacttcagggtaggcgctctgatcatctattgcacagaaaaggggaatcaggctttgtgggtgctgccccagcctctagctctggagagctcagaaatgaacacccagcagagggcagttgtatgggacagtggattttcatcctccctcccctttcctatctttttttttgagacagagtcttgctttgtcacacaggctgtaggtgcgatgttggctcactgcaacctctgcctctcgggttcaagagattctcctgcctcagcctccccagtagctgcgattacaggcatgcgccaccacgcccggctaatttttgtctttttagtagagacagggtttcaccatgttggtcaggctggccttgaacccctgaccttgtgatctgccctcttcggcctcccaaagtgctgggattacaggcatgagccacggcgcccagcctcccctttcctatctttaaaaagcaaatgccctaggaagggttataccttaagtcattatcaggtaaccctttagtgaccagatgaggaaatgggctacagagtagctgcttagtcttgacactggaggggttagcacaggaggattcggggtaccctgggaggaaggtttgctaacagcaaaacaaaggctccacaccagcggcaagagaccaagttcactcatttccccttgttttcaaaaccttcttgtctgcttactttgctatgtatgtccttaggagctggttcttgctccaggtggcatgagttaccttgctttagggggcagtttttaggcaggattcattctaggcaaagttccaccagccaaagctctctgagcatcctgcctcatctatacataggagtaaacagagcttcagccaacgactggatcacatcatgagacggagtaatctgctatttacttgtattctcttacctcctcaagttgtttgagacagaaataaagacttccttgtttggtaggcatgggaggaattttaatcttctgcacatgtaaatgtgagattgtaggatttctcttgcctttattactggtatcatcaaacactgcattgggctcactgtccgctaacagcaattcttgtattattatttcagagttagctgtgagttaaagtatcttcgggccccacttggtcttgaaattgttaaaaggcattgggtacaccaaaaatgtccttgggcctctgaaggggagaaaagggtcagaatggtcccaactcagatgcaagtctcctgggaagggacgtgttccccactttgtgcaggtcaggcaggggtgcactgcagaactggtttccaccatcgtaccagtcatggaagggtttccatcagctcaggattgtaattgtgtcccactggaggaacagcacgaagttctgaagatacttgtgccttctatataaccctcacttctcagagcatggtctggggtagagcagcatcagcctcacctggaagcttataagaaatccagaatctcaggctctacccagatctactgaatcagaatctgtattttaaaaataaccccaggggattcttatgcacatttaagtttgaggccccctggtctagcccactggaaaacagagtccttcttggtggatttcgagtgtattgttctaggcaacgttgtaaagcaggtgaggcttctcttcgggaccaccgactctattttcaatattcttttctctcattaaagcttccttttctctgcatttcccttcactccctcccaaaagcacccagacaaaaccctactgacgaagactgtgcactcaacatagcccaggtccctgacatactggagaaaagagacatgattaaataattcctatgaagctgttagtgacttaggatttgcagggttctttctcatatggatattgcactctaaaatagggtacttaatgaatcactgtttaacctaaagattatatttcctttcatagaattcgagtcacggtggcactctgacagagattgcagatatctggggatagggtgacttttataatcactaataggatgctatgtgggtgactacttaatccgactatgtaacagactggacccccaagctttgggtgacccccaaaacttcccagctcagtaagccctcattattgctcacagacactgaattcttagtgctgcttctcagatacttctttcttatctttattattttgctatgtttggccacttaagatacagagtccagttttcaaaataaggaatggattttaggagagtttttgataagtcaaagaaacataaaagaagagaattgttgagatatgattcaggaactatttctggagatagctgaacccatgcttaatagggtgctagttttgccgggcagctttgacatgtgacaactgtttctccttttaatttccagttattgtagaaataaatctggcttacatggtatttctcctttttattgcttgacctgatgtttttttccccatgcaagtcacttcctagcaattcactccaatattacagcaacaccctgactgtcctgtgcccaggtatgttgacaggtgaaatcccttaacataaattttgtcaaaaaaaaaagcctgtaaaagacagatgctgggaagtggaaattgataaatccaggtgttacaaatgggacactgttaaatgcaaggattgcaaatgttatataagtaaacacaatgtccataggtaggaaattgcaaaagacaggtgctgtgaatattggtctatgaggccaacagacagccctttgcaaataacatgggccttttaatagacaaataagagctgaaactttcatgcagagttccaatcccctggtagaggatctttttggctaagtaactcactaaacaatgatgagaggacaagtgtaacaacctccctttaaactaatctccctgggtaacctgccagggagtttttccaggaacattagctaccagctcaagagcagcctttcatgtagatacttttatgagatgattgatagaagtagggcaggtctcttggtttcaaaatttctcttttaccagcctgtaatatgcctgaaattgcaccattagcaatatattttttggattaattctctaccaccaacaggatagatagagcaatcattcatttattcatcagatgtttattaagcacttactgtgagccaagtactattcttggtaaaggaaattcaaaggtaagtacaacatcgttcttgcccttgagatgttgagagtctagttgggaatacaggaggtaaacaaataactacagcaatataactagtgctttgatagagatagcggtaggctctatgggaacacagaggaagaagaacttgacccgggactcttgagctgagtcttaaaggatgagtaggagtttgcacacagatgcaaaggatggaggtctgcagtttgggtgtgggaggggagaaggaataagggatgattttggaccattgggccataggggtgagcatccctgtgcctgagctgggattacagttcttgggttcctgtggggcatcatgtcagtgttggctgcctatatatgtagagagagtgcttctggagatggggatgggggtaggatttatgcaaagaggagatggaggatggcagagaccaatgcatctacttggatgccatggaaagcctgacggcactagatttttctttcaagtcatcacctcttcattcaacttgctttcccatccaggtacttttctacccagctgtggcacacccatgacttcagcagggagagagttaagactttgaggatggacagcaaaactccatctattttttttttgttcgtttgtttctgtttttaacattcatgatttgggtattgtagaaactatcaaagatggcttaaatgaggtctttgtgtgataggaaatgttcttagctctgtgcttcccaaactcttttaacattgaactgctctctgcagaacatccatcttggtgagccttcactaaatgcatagaagtgacagcaaataatgtagctgatctaactacctcccctataggatttactttcagagttttaagggaaattttcaagcagaaaatggttacatggataaaattgttgagatttaattagacttttataagaaatgtgagagaattttgttatcaaagtctaagcggtaggctgggtgatgtggagatgtcgaataccttgactttcacttctgaagaactggttttaagcatcctcttttcaaatagacaattaattcttacataagagatggtgaccaactagtctctttttccaaagaggaataaaagacaaaaagaaaatggttggaattgtggttaatgatattcaggttggaccaagaaagattattgggtgcttcaatggattgtcaaagatgacagaaaattccatctttgtggtaataagtaccctgctatgtctatacttttccttgacaagctttttcatactaacatttcactttgtactcagaatccattccttgaaagttccttggtttatggttgagggaactgatactcaaagaacattaagagacctggctaaagttacacagccaagtggtaatagatacaagctttaaactcagagttctttctaatacctgacacttttgtcttctaggctgtaaatgaaaatacagcagaatcagatctgtccaataaatcctgattgaaggccagaactgaaagtatttcttctgaggctgagaaaaattccatctcaaacattgaaagggtagaaataggcagtgaagtcctagtgcctgctctgtttggcctttctgggttaaaaacatacttaaaattgagtgactctgttgtggaataaaatccaaacaatctgggttgaaaaagactgcttaggggtgtgtgggtcacagtgatgctaagggtattcttttttttttttttttttttttttgagacggagtcttgctgtttcgcccaggccagagtgcagtggcgctgtcttggctcactgcaagctctgcctcccaggttcatgccattctcccgcctcagcctcccgagtagctgggactacaggcgcttgccaccgcgtccggctaattttttgtatttttagtagagacggggtttcaccatgttcgccaggatggtctcgatctcctgacctcgtgatctgcccgcctcggcctcccaaagtgctgggattacaggcatgagccactgcgcccggcccgctaagggtattcttgatatccgctgggataatgtgaccacaggacaccttgcttgctttctccaagaatctcaagaagactacaaaccccaagaagggaggcatcttgttcaagatcatgttggggatagaagacagagtgagaatgagaaagcagagatgttcatttgttttatgaacatttacttatctgccaaggtctgtagccctggccttccctgtgaagagcagcagcctgaaccaacgttcagtggccggggctgccgagccaggaccttacggggctgcagcctgtgctgacccagggcctccacagtgctttgcttgcagatccccccaaaagagttgtgaaaaagtctgtgcctcatcatgcgttttcaagttgacatcccaaaagtttcatgataattttaaatggttgtaaatgatgcaatttctggtgctttataaatcttgacagtttaacataaaattgttgcattactcttttaaagtttccaataaaatataaacactgcagctatttgataccttctattatgtattcaaagatatataaaagccctgtttttaacagtcaaagatttttcatcatttctttttctccttggatacatatttacattccatttccttcttaaaattttaccctaatacgatatatttttatgctggaaagtcttttactgatcacgctaccatattactctgcaacaaaaagaggcttataaattaaaatttaaaatttaaaaattttataaacataaggctttgtgttatacgcttcttttggattgaattttcatcacagatactattaatgtacaactgagcaaaacaacatatttacattatgagcttttcgaggtaattcttaatataaaatgtaccagaaataatatattttacatgatcgaagggatatgttgtccgattcaagaggctttctagacacctgtatttcaaatgtctccttgtctgggcaccagtatttcctagatttccttgtttggtgtcctgggggcattcacaccacagggatatggacctggaaggatgcagggtgaatgacaggtgtgcttctctgctgaagtgtaggataaggatgcccctttgagagacaggagaagcggcaggtgggctccaggctctgccccgggttgtcctccggtgaacgtgaagactgagcacatatgaaagttgagggtctggaaatgaattctattaaatcatgacttgtacacaagtttcaagatgtcctacactactccaatcactttcgaaggccacttgggaaattgttagcatgttcttgattcatccacataagaatagtttgcataagctattcaatataaatacaagcataaatatgcctgtactttgagaaatatgcctgtactttaagaggaagacgtgttttggggtgtttcatctggataatcagttgcaatagacactgtcacccgtttatctggaacaaatagaactattatgtgctacataaattataaatgattgcaatattacttcatcgcaagatcattatggttacagcctgccctcctatgaattagaatcattgactgatattatgctgattggaacagaagtcaattcaatgcatcagaacttggcaaatccctaaccacacatggttcacacacatgcggttgttgatttattccagcctgttagtcaagatagttaacatactatggtaatattttccacattcctggagcttaatataatacaaatctatttcttgatcatactatatccagagggggctagtgagaggttctggttcacaaagtcactcagggactcagggttgatggatgcttctctatcttgcagctgtaccatctggataatgtggcaggagaggggagagacagaagaattgaaacaggtcttccatctcctcaacctggaggtgacacagtcacttctgcttacatttcattcgtcaggactagtccaatagttgtgtccaaatgcagaatggctgagaagctcactctgccatgtgccccagaggagaagaaaacagaatattcttttttttttttttttttttttttgagacagagtctcgctctgtcgcccaggccggactgcggactgcagtggcgcaatctcggctcactgcaagctccgcttcccgggttcacgccattctcctgcctcagcctccccagtagctgggactacaggcgcccgccattgcgcccggctaattttttgtatttttagtagagacggggtttcaccttgttagccaggatggtctcgatctcctgacctcatgatccacccgcctcggcctcccaaagtgctgggattacaggcgtgagccaccgcgcccggccaaaaacagaatattcttgctaactaaactatagtagaagttgatatgggtggcattggtcaattggtcattggttaaaaaaatgattaccaagagttagtgattaataataaaataatggggttatattcatcacaaaaaatcattatgtaagcaggaccgaacatgacaaaggcagaaaatttgaatctgctatgtaaagaggcaaaaatgtaaaccttgggagattgaaacttaccttcaagtatgactttgactgaaggaagacctatctagctggcagaggtacttcagctgggtcatacgaatacatgactggaagtgtcctgccatacttgacaactctgcccagctcttgtttccaccaggctccacttggccactaagtggaagtcattcggcaagttcatgagagtcactactgagaagatatccctttggttgccctcgtgactttgcctatttctagatgtattatggagcaatgacctctctagcagggcggtggtgattagttgtaacttccccgcccccaggtacttggaaaatggccgaatcaacaacttagagtgaactagccaagtgttaattagttatatggcattgaggtttaccgttccaggaatgtaaatatttggaattattcctatcagtgttatctatattcttttagatttcagggatgggaccgctgcaggttgacccaagggtatccctataaaagatccttggaatctacaattacaagagtgcatcatctttaaaaaagaggtttcagggaacaaatatccctttttgtctattgaggtggcctggtcccaaatgtcatatcaaggaaagggttacctgacctgtgtaagactaggaaccagaaatgttcctggctgcataaccctagtctcgcatgacttctgatactgtaggaaagcaagctggaaattaatgtgtggaattctaagagagatgcaagcaaagtgaccatttgggaaggaataatccagaatgcaaatacaaactgagccgtcatttattattcatccttgggtgagagggagaagaaccaggggtcagagagagaagacattacagattgaatgccagctgaaatatggaaggaaaggtgagtttgccaagagttatattagtagggggactgtgaatagaatgagggttgatggctgatttctgatggccaaataaatgtgtttactcttaggaccgtgttttgaaaatgacagagaacttagaatgcattcacagaagggtaaaaagagaagagagaacatttataaagctaattagaagaggaaggttctgaaagccctactgaaaagaacacttttcagcttcctttgagaagacattttctatctagctccattgaatacgtttgaactggcctggaacagttaagaaggtaaaggggttagggaggttgaggatcagaatggtctttggggtttaaagccaggtccacttctacccagctgagttggcttggccaggttactgaacctctccaagcattcaatttctctaattaaatagccgagggtgattgactgaaaggattgtttaagtgtaagaccaagttctgtgggaagaagcatcctccatagtgcagcaccttcgtcaccactcacttaagctctaacatatggcaataacttctgtattataagtgaagaaactgagcctcagtgagagaaagaggttgctaaagtttcaggaattagcaaatgttggacttgagattcaagtgaaaatgggtgaagaaacattcctgtaggttagggtagcgcagtgggttgaatagcagccgctcagaatgtaagtccatgtcctaatccccagagagtgtcagtgttagcttatcaggaaaaagggtctttgcagatgtaattaacttaagaattttgagatgaagacatcgtctgggattatctggggagccctaattccaatgacaggtgtccttgtaaaagccaagcagaaggagatctgactgccagaagatgaggaggcaaggtgaccatggagacagtgtgatgtggccacaagtcaaggaatgctgccagccagcagaagttggaaagggacaaagaaggggttctccctgagagccactgcaggcagcacaccctgctggattttcaacttctggcctcaaaactgtgagagaataaattgctgttgttttaaaacacccagctagtggtaatttgctatggcaaaaactgaatacatgtgggaacggctcgcactttgtgaaggcctttgagcacctaaaaaagtggacacaatagtggataggtctgagccttgactatgtggttccttctgggggtcagcaggtcacccagatgaaacaaactttctcagggccttaacaagtaatgaaggtacagctttggtgactgagcgcttcccttggtatcaacttctctttccaaagagcctcaggagatgaggccacacattcccattttgcagatgagcaaacagaagtccaagatagttacataattagcatgcaccactggcttgctgaggtagagggccatcatttgaattcacacatggtagatgaattctcccaccgggagagccagtccccaggatcaggccataaataacctcgctgcgttctgtctttgggggctaagcattgctgaaaatcacaaggctagtcatgttagtcatgttaccacaccttgttatcctaacaacttaggctgctgtagaataagcttgaattctcctcacactccgagtactctggcttccccttgggacggacgctggggctgagctgccaggagagttttccctaagtgtagtgtataacagcccagtgggttaggtgggatctggtccatcctatggcttctagataaacagacaggaggaaagatggagatgtgatggaagggagaactctgccagcagaggtttttaaatactaacataagttgtgaaggcctcagcgttattatgggtcttccaaaagaaggagaaaggccattctgcaccctcttcagctttgctctctgaaccgtgggttgggggatttcccccaaagccttcttctctcctccattctagttctagtgcctgaaatgttgcccacagtagcggccagtgcacggcctctgggtttgtgtagacttgggttcaaatcctgattctataatttgctgacaaagcaatcttccgcaagaaagttaacctcttagctactgttttgcacctgtacaatggtggtaagtctctttggcagggctgtggtgaattcagggcacatagtagatactcaacaaatctttttcacaggggtgaaggatgataacagctaacattaaatgagcacactgtgcaccccacacactttacttggactatttcatttcattctcacaaccaccctatggaggtaggtaccattattagcttcatattgtaaaaactgggtgttaagaggtaaagccaggtgtccacatgcccatagctcatagcaggcagaacctggctctgtgtctggcctgtctccaaagaccaggctcttcgctgtatttaaagtgcctatcatagcacctgatactcaccaggcatattaaatgatgataattagtatgaattcaacaaacatatatattgagggcaactatgtgccaggcactatttacccataaaaatatctaaacaagtaacctggtcacaggtgggagcactacactgttgcatcagccagctttggtcagggaagtggtaccaccgtgagtgatgtggaggaagggattgattgcagagattagaccttatccagttgtggaagctggtgaagaatctctagaaggctgctgcctctgcatctgaggatgggtgtgaagttgccgtaatgccaaaaggccggaggaaagcaggacatgatgtgggagagagtgaggccaaagtggagcccacaaggacaaataaaacccttgtttgcctttcaccacttccgatctcgaccatgaaacataaagctggaatcttgactacagagctggacacgtactttgcccaggcctcagagtagctgaaggaggagatctagcaggagctggaggagctgtgggctccaccatcagggtgagccagcaattcggtgacaatgagcgcatgctgctgcttcatgtccaccttccagaggctccacaaatacctgttgtggacaaccttaacgcagaaccacataaggaaggcaattctgggaaataggttccagcttagtgaagttgacctaatgcaaaaccaccacactgatgttcccatcgctggcctttgagaaggaacggttgtgcgtggccctatgtggagataaagaaggtaaggtgtcagaaggcacatttaagctgggctttctgactccactcttcctactctggcttgctaatcaactttacctggtttgaaatgcccacccttatatacaggcaattatgtggattagaaattaaggatgaaacatcttcccaaaaggtcactgttaagatttacccatcatcttggtgctcctagctctctacgaccaacacagagtggctgacacttcaaccaggcagcttggattgcaatgaggacaatgcaatgcatttgggctggaaacactgcacaggtaatttttgcaggtgggtggcagcatttagtgctgagtggctgttgtggtgggcagagggagagaaatagaagggacaccttgcagacttgatgggagacttattctgaagagattgattagcagtgttgtccctggctaggcagtggggggagggctctgtgtcaagaggtgtgtgtgtgctaagggaagaggaagagcctgcttggcaacctggcttttcaagccttggaccagacagggaagaagaagaagaagaagaaacatttacgtgtaatcccacctcccaaagacagctactgtcaacactttttttccccacctgccccagattgaggatactgtcaacattttggtgtgaaccctatttagtcttttccctagttcaaatataaacctgactttaaaaggaaaatgaaatcatagtgcctgtaatattttcgtgacttgtttttcttttaatgtaaatcatctttttccacgttactaatattcttccttaatattgttcatgtctatgtagaatttaactgtatgaatgcactctagttcatctatgcggtggttaagagcgtaggctctgaagactgctagggttcaaatcccaggtctttcaacatcaactggctgtgaaacatgggcaagtgagtaaacgtttctgtgctttggtttcctcaccggtaaaatgtggataaaagcaattccttcacagggttgtttggaggagcaaatgactttatgtatgtgaggcacttagaataatctctcagtgttattatttaaccaacatttttgttgaatatttagttcatttccaggttttcactcttacaaatatactgtaattaacaaattcagtgcactcttaattgcttccaaagaaaatatctgtggtcacatttaaaaatcttttccagagtgaatcatgcactcaacacaaattgagtgtccatatgtacaaggcattatgttatgcacaaagaataaacacagttctcttcttgaagacacctaaaatgtagtaaggaagaggagagaaaaaggctcatgcaaatataagcaaaatactatgcagaaagagggcacacatgaagacctatgggagattctttagctggagaatcaaatcattcaatgacagagaaatgcagactccctcctctgctcccaccacctcccaaatccccaaatcggaattcacaatggtctccttttgtcatgttgagaatttgttacctcgaaagagcacacccagggctgtgttccaaagttaaaagctgggatatgggcgtatactgcaagaccaaatatttaggaaatacctttttctggaaaggaaagaacacatttcacagctgaaaagagaagtgaaaaatgaaactaaagaagcgtggaggtaatatttacttgctagatttatacagtgcctacctttagaaaagctgggctataaatcctgcacgtgaccccctaacacacatacactctgttcccagtgacttggctctttgtgaattatctgcagcatattttgcaatcatttcaccctgttcatctccctgcagccctgcccccaccagctcacccacacttcacccctcagaagaatgagtaagataatagtagagactgagtttggtgtcagatatgcctgggctaagtccaggctccacatttactcagctgggtgaccctggacattgtaattcaagtctcgaagtctcagtttccatatctgtaaaatggggataatcatgacgataacacatagcttattggatcgcagtgaggattaaataagataaaggctgtaaagggcctatcacagtacctggcacagagcactcagtagtgttagctattattattattcctgcacttgtgtgtaaaggggatgcaaaccaattttactattcatttaaacaaattatcagctacagcagcctctgaaacacaggcctataatgcatcctaaagtaaatgcgaaatatttgaatttgtgtcatttctaattttctctattaagttgaaaattgagtatgaacacaccagaatggcaaagaggccagatttctcttgtaaccaacaaaattgagatcgctattaacattagaatgaagatgaccgaaacagcttaatacttctcccaggggcacttgcattttacactggggccagaaccactggacaaaggaaggaaacaggagtggtaaggtttcaggtaccaagggacggacagatgcattttcatagggggaattgcaacactcctgaaagtatctcaggcactcactcatttattcaatacatattatgtacttactatctgccagatactgctctaggcactggtgaacaaaatagatgagacacctgccttcatgggggttacattttagtggggggatacagacaataagcaataaagttaatgaataagtaaactatatagtatgttagacaggatttcagtaagagtaaggggagatagggagcgctgtgggggtctgtcagtactgaatcaggatgaggtcctggtgagcctcactgaacaggtgagatttgcggaaagccttgaagaagccgagggagtttgtgtttcaggcagtgggaatagctagagcaaaggccttacaatgtgcgtgtgtgttgaggggtcattcctggagtgtctggggcccagccaggaggctagtgtatcccgagtgagggggacagcagtaggagatgatgtaaggggatttgtactcagccattcctgtaggtcaccacaaggaccatggcttttactaagtgaaatgggtaaccatggatggttttgagcagaggagtgctgggatgtgatgttttaaatgggttactccgactgctgtattgagaaaataccagaggggagagggaaggtagaccagggggatcagccacaggagaaacctgggtgaaggatgctggttcagccccaggtggtggcagtgcaggaaatgagaagtggtcaggttctgaattcacctgaaggtagggtcaacaggatctcctgatggactagacgtggaatgatgagagaaaggagtcaagagtgactccaggattttgaactgagcaactagaagtatgggatggtcatcgactgcgatggggaaggctgtgtgaggaggagcaggctttgaagagatcaggaatccagtgtttggatgtattaggcttgaaatgtctatcagacggagtcagctgtagtctggaattcaggagagaggtctgggctggagatagacatttgatatagacagctgctgaaagccacgggaatggttagggtcacccagggaatgagggtggatgtggaggcgaggaggtcttatgtggaggcaggtagaggttttccccaagagggagttgtaggcccccctgaaagggatcacgaagccccactggaggggagcccggtcctgcagggggtgccgtggaacttgctgtggttgcagggagtgatggagggaagtgtttgcttctccgggaaggagaggtgctggatagattcctgccggagttgcagaaataattaagagaagtaggtaaggatatcctagtagaacacgtgctcggctgcctccaaggaattattaaacctgggtctaggaatctgttcagacatctgggcaccgctgcctcgcctaccaggctccgcctcgctgcccctcccgcttcccctcccctcctctatctgtcacttctacaaccgctctgattataattgatcaaacagaatcacggaatcacggctcatcttgccgttttgttcagtggcccgatccgaaacgagactctggtagtcgggcaaattgtattcctcctccttggaattccgctcacagaggccttcccggcgtggccggcccagcagggacgcgccgccgcagcggaggagagaacgcgggcggggggctgcaggccggcgcggggggcgcgacgccgccggcggggcgcgagggggtgtgtccgcgccgcggccaccgcggccaccgcggctggcgcccgggtgcgccgcgcgccccggcctccccgggggctcctcacgccgcccctcgcccgccggcggccggggcccgctccctttgacgtcatgcgggcggagggctcgctcgggcggcgctgccgcgggcgccgggagggggcccgacttcgggctccagtccgccgccgtgcgccccgcgccgtgcgcccggctccctgcgcgccgccgcagccacatctggaagcgttcagcgcgtctgcctccggcgcgccgggcgggcgggcgggcggcgcgggcaggggcgggcgcgggcgcggcggggctgggccggggggagtgagcgcggcgctctcgcgcgcccggtgtctccctctcgctgcctctgcagaaacagctcctgccagagcggcgctcggcgcggcgcggcgggcccggagcggcggcggcggctcttcctgcctccgcgcccaggagttgccggctccctttgacagcagagagccgggcaggggcctcaggaggactcgctgggagtgggcagaggcgcctcggcccctgccggcccaggcgggccccgcgcgccccccgcccctcctctccgcctcttctcgccctgcctctcccgatttattttttcaaatggtgtagccgccggaggtgcggtgctcagttcttggaaggggcccggatgtactgaggatgcgttacagtttcactcgaggaggcagtagtggaaaggagcagtttttggggtttgatgccataatgggaatcaggtaatcgtcggcggggaagaagaaacgctgcagaccacggcttcctcgaatcttgcgcgaaagccgccggcctcggaggagggattaatccagacccgccggggggtgttttcacatttcttcctcttcgtggctgctcctcctattaaaaccatttttggtccatggtcaatgagaatacgaggatgtacattccagaggaaaaccaccaaggtaaggctggaccccgccgcctcgccggggctccctgccttttccaccgggttcctgccctacccgcgctccccgcggccccggggccggtccctgcggagtggcccggggccgcgtccgcgaggggcgcctccgcctcgtcggagcgcccgggagcccggcgggaccggggcccgaaccgccgcgcgagacggagcggaaaattcccgcccctccccctccgggccccagcttctccagagcatgtgtttcctgtgaaattccaggcgaggggggaaaagttccccaagtggctgccgccgcctcgctttctcgcgtccgcctggagagcccggctgcctggccagccgcgcggggggcagagggcgccggcgccgcggagcccagaggcccggggtccctcgcccggctcggggcgcggctgggagcgcgcgcgcgcgcaccctgcgccggcagagcccggcgcccacggccgcccctggggcgccctcgcgctgcccggcgtccactctcgtccaggcgcccctgccctgggcggcgcgctccaggtggcgggtgggggcggcggtgcagatgtgaagcccagcgcgcccctctggttccccctctgtaggtccccttcttcctctctccctccctcctccgccgctcacctacacccacccacctctccactgctgttgaccccgagcgcgcccacgccgcgtgtgttctcattcgcacccacatgtgggctagcacctgaggatggaagcggcgaggagccgggcggtgtgtgggctttgctgtttcgtgtttgaaggagatcatgaaagggtgtgcctggctcacgcggctccatactattgcccagtgttttccgagcatctccatccttggccgcgagtgtcaccagctccccctgtgatggtgaaaggcagtcaggtaactccctacttcctggaaactttctccctcaccgctctccccccatattaacaagttgttttcttggacgttgcttagcatttaaggttttggggacggggggtgcagacagggtggtccagcggggctttctggcaacctccaggcatgacatctctttcttctcgccactgctctgtctctttgggtgtagtctctcccttttctctcccagttcccagagcctccctgtttgcactcttcctcttctcttcccctgaaagcctatctgtcactgctggtctctgttccttccctgggttcttcccagtgatcctctgaagaccagcctggtggaaggagttgtctccaggtctttttgtccagctttttccctctgtttgctcccagctccaccttttggggacagggccttcactctttagagccagaagctgccatccagcctgcctggtctccatctatcctgaaaccgattttggggccagtcttctctgctttccagcatgggtggcagcttggggattgtggcctcctttggaagaaagaatcttgtcaagggtcatgggttctagggtgagccagagctttggggtcacaagggcagtatccatgtttggatttctctactgttgaccccatccctcacctgatcccctctcccttctgtagctgatgggctagtgaatggtttaggagggaaggagtgagacacaaaagagggtggtatttgtgaagagtggggatgcaagatgactcccctccaggttctgagactgcgtgctttacccacctcctcagtctaagcagcattgaagaggagagctctgtagtattgccctaagtatcactgtcaatggcaatgtactgtggtaataatagtgattattcaccttattcacaggatgataatcttaactagtttacaaggtctcctcttagtgcaggataaaccccttctgaacccatttccttactctggttgttttctttggcccctttgcctctcagcatctccctgctgtatgctgggagcagacattaaaagtaggagtgccaaccccagagaggttcctgagaaaggtagaggggaagggagcaagggagccagcggctgagagctctacctttccagcaacatgccagcaaacgctatggcaacctgaattccagttctctcccttgaagctgcagtgattatataattcatgggagcagttttgcctccatttctagatgcggttcccaggtggaagagcaccaagatccctgtctcccctctactctccatcttctcttctttagttggttggcattgccgaggttgttggggtaggagaggggaggagggtggtggaggtgggaagggcagacctagaacagaatgaatattgacaaggaagaggttgctgtggctaatcactaaagggggcgggtgagccatcataggggttagagtttcaggagacagaagaggagtctaggactgcctcagaagatcagtaatggtgacgaaacaaagagtcgagaaccaaaaaagttgtcagtggcgggggctgtgcattcctctcttcccgacatgctctgagatgtggaatgcaccagtccttgctccctcaccttttccgtggagtgtgtgcatgtgtgagtgtgtgtgagtgtgtgtgtgtgtgtgtgtgtgtgtgtgtgtgtgtgtgtgttgagggtcgaactggagactggaggtcagtgcctgggaacagcctggaagttcattgaaggaccagcttctgaccctgggtttcaggctggggtggcacactcaagccttgcctcgcctctggtgccctgtctgctctgggcctgtgccagcctcccacttttctgggccgattttctattgcaggctccagctagcaaatgagtgtcttaatagtcaaccattgaacaaataaaacaccagaatgtcccttatctgctagagacaaggcagaggggagaaacatgtgtttggggagtgcaagacacactgtgcttttcttttaactacttagcgattcagcagaataagaatcactgtaataaggtaataataataatgatcacagttaactttctttacaaatggtcagagaacaacattgctcgcacatcagcttgagcaggttaaagaaagctgtggcaatagctttgctttttcttgatcctgcatggagaaaactggaggaaaggggctattggagttcatcatattattcctactattggtcaggcactttttagtgttttagaatatgacaatatattaaaaagagtcaatttttcattatttccatagaatacacactaacagtatttaagtgtgtgtgtgtatacatacacacatggaataaggaaaagctattttaaatagatcacacgagaggctaatgcccttcagggacctggggtgttgagagagaagtattgataatgcagtctcctaagactgtttaaagatttcttcttcatagtaaagggagacttgttcttacaggtagatgctgcaggcacagtgctttgtaaatgaaatgatgagccgttagccccgtgggaccatctctcagtcttggcaatgacctaggtctcttcaatttgttcttcaaataaaactgcttgagttgggttcttctgtaagacctatcaaagggatccaaggagcatactgactggagatttcgaggccctgctcatcttgggatccctgcttcctagtacaggccgctgctcagtccagggcctcgatgcaaggctgaacaaataaatgtctgcgtgaatgaatgaatgcgacctggccagacctgcagtagatgtggcttctgcctcttccagtaggtggcgccacagggcttaggagtcaggaaaggggcttcagggtccgcctggtgatgaaaggtgtagggggagtttagagcttgtgacctgttggggctgtgctgcttccatcaggcccacacctgccccggcacaggtaacccaaaagaccagtgtgtctccgtgccgccgcacacactggaggccctcgcggcatcactgagggacccaggtcccacagtgacctctccaccctgttgtaatgagaactcctttggagcccacccagtccgtcgcaggctcttcccacagacgtctgttcccttccagcacagacagcatcccgccgagcctggaggaagccttttgggtgaatcgctgaacttggtatggccagatgttaattttctccctgatttttcactgatggtttagtaaccagagggcccggtggtgcccaagcccagtggagcatggggtgacctgaagcatgggatctgggaacccagacctgtgcagtcacagagcttgccagccaaaggcaggaggacattttcctaactttaatagggaaaagaacacaaaaacaactgggtgcacttcacagttgatttccgtttatgagtctgcctggatctcctgctgggtaatggcagaaaagctcaggagacccaggttaggaagtaactgagatttgttctaatttccagtgatgttttccagcgcctggcattttcttttctattcctttcttcactcggttttcttagttgtgtggcaagttccatgaggtctgagaagcccttggcactgtgctaagaaggggtgagtggctggcagcactttcttccttttacagtaattcctcccgcctgatacagcagctgtttgttctgtaggaggtacaggtcagccggcgtcatctcacctcttccttgctgggaccctgaaatcagtgctgagcattcagatttagcagacaattttattttccaatatggactacagaaagctgatagactgtttgcgaaacacctggagacttaacaacaagcctaattaacaaaataatcacactgatttcatctgtttctagattccatcctcacagttgcctaggttaatgttgggcactgtggaggagaacagaagattggttttaaaaaaaaaggcatggggaattgttttgcaacatatcaggtgccaaatatttagggacagaagtgctaaacattctgataatgaaataacactctgagccatggctgtcattattaaaataatttagtaaacacctgtttacatgtacctcaaggttagataccacgtaaaacaagtaaaagtgacaggatccctcggggaaaatggaatggaatgtttttcggtgtcatttcgaagccgggtgtgtagacttaaactgaacccactgcagaaaaagcaaaatggaaggctgaaataatgaatgccatcatttgaactgaaacctgggcactccagaagagctcttctctgtgttttaattcctagatggggtgcttatttgctcaagaccaggctttcctgagcctgtgtagacacgggcctggagcaggtagacagaccctcttggtttctatagttgaggcacccctggaggcagctgtttatcatggcaggaagggaagtggatgcattctctactgccccctttcccctgccgaattcaggcaggacccgcgcaggtccctggagaaccttgcttcagtgctagctgtgtgtaccgtgtgggcaggaccccagctgggagatggggagcccaggatgaccccacagaaaagcagagctgtgagatggctggagcctccgagagctgagatgcagaaggtgaggggaagccagaggagccccaactccctagggtgtctgggagggtttggggaacaaggtcatcagggtagtcagttactccttgtggagctgaactgaatttaagttgggattgtagggactgtaggagagaagtttgggcctggagctcaggagtcggaccgaggttgaaaatagacccttccttccctggaagccgagggaactagaggaagggttcatctggctgaagcagagggtgaggaaagcgggggttaactggcaagaaacccaaacctctcagcccctcccctccccaaaaccccacagaacagttctctgcaaaacaccttcactttaaaatgggcttcttgtgctataccctgtgtgtatagggggcaaggggctaggctctggttcgttaaagggtttgtcaaacatagaataaatgtaatgtctctttgggaatttactttctaggatcaggacattttatgggtaaaggaaccttagagacaatcctcatttccagttgagaaaacagaggcccctaaaggttcatggaggcagggatgtaactaaatacaaggtcttcagtctcttcatcctcctgcctgtaccacacttggtgctggccccctgagagagcattgttagtgcttctggctaaattttgcttggtagatctttcaacctctctattcttcctccccctgcctccacctttgtactgccttaaaataatttctgcgatgttagatttaggaatggagttggaagggtggggtgggggaaatctatcattggaaaggtttaaaaacactttcttaggctacagagtagaagttcatacatgtccacaagaaactcctgcaaaattcagatcacgattttgtctgcaaacagatctgcctctaagccttttttatttgctcacttcctctcggccccaatctaggcttgtttcagcccctttgcgagagtgggatggggatgggaagccgggctgtgctgtgggacttccctggtgagctgctgggattcttcatggaccagctggcattaccagtagctggggtatagacacacagatcagccccagggtagagactgtgagacaggctgccacagactccacctgagctgggcgaccaagggcgtctttctgctcccatgtcagggttggtctcctaggacccccggcctactcccaggagacattcccagcagtggtggtagactcagcccatggaagagaatcactaggacctgcctctgacattcccatcttccttgaagtgttcattggctgacttgtttcatactctttcaagtcatctctgagaaactggaaggcctctgaggctgactcggtctagcttgaagacggaggcatgagccaggctcatgcttagagatgtggcttttgagttccctggaggaagccatcatttcagaacatagtgttgtgataatttcatgaaatattcaagctgccaatttgccaacaggggtttcttttaatacactcggctacacttggtgttgcccacttgaacctagctaaaaggaaaataaaataatcttgtctcctgtcctttagagaaccaagccaaaatctagacagtgaatgaatgttcttctccatattgcctgtgggcagaaatgttgacttgagtactcaattaagctctatttactttataaccattgtgtcatgtacagtcatttatattcctttctttcttccaaaataatctacgttgggctaaaacctttcaaagacattaacaaaagtaacaaagtaaatagctaaagaataaataaggctgtaggctagagaaatgacttgggtcttgggtcacattctttgacttcatctctttctctgagagttcagaaggaatcaaatccctttttttttttttgtctgtaaagtggagataataatccttagccaattcacttcgcagggcagctgtgaggatccaaataggagaatgagtgtatatcgctgttcaaacatcagctactcttattctccccatcagcgagcagagcaccagagtttggaaaagcaacgccatgaagtaacattcacagcatttcaaacaactttggaggtgttgtgggagggctgacattattcaatattttaaaggtgaaaatgtaaaacaaagagaaaccagagtctgaggtggtctggctgataccagaataatcagggaggaagtgaaccattggttgagatgggcctggtattttgccctccagagagtctaggagcctgtggccagtaggctcccaggacggtggagccatgtgcactgctggcactgctgctgtttccaagctgagggtgaggacatggggatgcagggtatccgacgcctggcagctgtccacctgccatgctgctgtcccctcactgccaccacacatggctgcctggcttcggcctcaagtccaaagccacgctggcctgaagtcctttcatggcctgaaaatagggccattgagggcaggaagaacaccacctgggcaaccaatgtctcctcacttttgaacgtgaattccccaaacctaaacccaacttcccagtacaggaggacgggctggaaaataaaactttgcttcaaaagtaaactttgggtttggaaaataaacttatttatttttcatagccaaaatgttgcaggtttggagatagaggggacagttctgtgtagctccctaagacactgatcaaaataggaaagagctttaacattatagtctaagtgacaggattagttttagtttcccaaagcaaaaataatcccatcatcaaaaagtatgctgggaaactttcgcactttcgcatttgtttgcaccttgttctacccccagctctggtcctgtgatctgtggagccatatatgttttaatttttctctaaagaaaaaaagctgtattgaggtataacatctaccttgttataattttaaaatagagcaagagtaatagccaccatttattgaatgcctagcatgtgttagacaatgttcttggtgcttcatgtgcttaatatgttttatccttacagtaatcctaccacgtgggttttaattatattttttagataaggaaactgaggaccaaagtcttaagcaatgtggccacagccacccagacagtgttggggctgggaattaaattcaggtctgtcggactttcaaaacatttgctctttctgttacttctccccatggagaacagtagaaagagaaacccactatctctctatcctgggaaaatgaccttgtccttgccttctggaacctggcttagatttgccttgtggaagctcagagctggaatccttgttcttacttgatggctgcatgttgtcgtggtaccccgcctcccctcctggtcccgtcctctggctttctttccccttattcccagggtttctgccagggccctccttgcttcttcacatctcctcacaggccttcacagaccacctaggtcagtacaccttgtctcccgggggacccatttgtggcatggccttgcttcaccacccattcttggaatatttcctcagtcactccctccaggaaaatagacactctccattctcaaacgagattcccgtgagtcccggggaccatccctgtaagctgagctctccagacttcatgcattatttatttatttattttgaaatagcagctttgttgaggtataattcgcataccgtaaaatttacccttttgatgtgtatgattcagtggtctacctacttccccaatattttcatcacccgcaaaaaataccctttacccattggtagtcacttttcattcccctctctctccagcccttggcaaccatgaatttacttttgtctctatggattttcatgtgttattgacagcaataataattccttttttttttttttcctgaggtgtagtctcgctctgtcaccaggctggagtgcagtggtacgatctcgtctcactgcaacctccgactccctggttcaagcgattctcctgcctcagtctcctgagtagctgggactacaggcacccaccaccatgcctggcttatttttgtatttttagtagagatgggatttcaccatgttggccaggatggtctccatctcctgacctcttgatccacccgcttggcctcccaaagtgctgggattacaggcgtgaaccactgtgcccagccaacagcaataataattctacagttggagtttgctgtgtagtctgactgttgataacatatctcacaaatttcagacctagataggtcatgacaatttacatgataaatgatgacattgaaaggaagcacgtgaaattagggagctggctgtcatttggaggtgggattaagcgttttctttcaattatacaaaaaagtggttttagcatttttcaaaggtatcttagcataatgtcttcaaggttcatccacgttgtaccatgtgtcaggacttcgttcctttttatggctgaatagtatttcattgaaagcacacgccacattttgcttatccattcttctgttgatggacacttgcgttttcaccttttggctattgtgaatggtgctgcaatgaacaccagtattcaagtatctatttgaatccatttttagttattttgggtttacctaggagtggaattgctggccctgcaatatgactttttagctttaagagcccacttccttgggtagtgccccaaatttgaagcccacgtagatgagactacagcattaggaaatcctattgtgtcagtagtgagggtttggtatttagtctgggctcccagttcctataccagaaatttgactttaattggtgtttcacaatctgacagctgccttttgatgaggagtgactgatactgcctctgttcaaaaaaacaaaatgaaacaaaaacgaaacaaaaaaaaccggtgtctctatatccagttcagctttcacctcgttgctgacctggcttcgtaactcaacaggaaattggtgtttggcaagacaaagctatttagtctgtctctgtctctccctctgcctgtgtgtctagtccaggagcacccatgtctgtggctagagatgtgggcctgataagcctggggactgttgggagagggtggctcccctcatgtgtggctgggccgagtcctccctggactgtgagggggaggcagctctgtgctctgtgctggccaggtgctgcctgccctgccccaggcatgactgattaataagggatctctgccttcagcctgaaagctgccttcagaggggaaaagcagcttcccagggctctcacctgctcctcatacatctaaagtctaggcaagagaggcaaaaacgtgagaagaaaggtaaacagtccggggagaaaattgggaaaggaggaaggggagagggaagcgagcagtgggtagacagccaggggaaacagcagcacgtggtaggctcttggctgtggattgatgccccagttaaatgactctggaagcctctttccagtcttgggataggtattttcttggtgatcattttacctaagagtgataatatcatcggctgcatttctgtcttagcatgttgaactctgctaatctgaggaagaaacacacacatacattgatgcctcagctgaacccattaatcagagacctgggtatggataaaaaagcgcacaggctcatggaggtatgtgaagctcagaagactttgcactttgaaggccaatgtacttaatttaatccaaccgactattagtaaattcctctcctttgggctctgccctcacaccccctcactggccctgctcacaggtgcctctgggccgctgtgcagagctggaatgttgcacagcatttctccaaggtggaagcttctgttgccatatctggctgcctgagacatcctggggattcgagctatacatccaagtggatttcagtgactcagagctcatatttggtctgtcgtgaataggatcttgtgcctctgtttttaaaattatttaaaaggcaaaaattttgacctatgcccagctgtctgaaagaccaggagataagaagccttttctaggataaattgactgtgaaatatctctgaaaatgaactgtctcatgccagttgtgatgaaaacaattctaaatagttttttttcctccagaataggaatggttagtcattaacaaaaagttattgagcgtctgctatctgcaaggcagtttgcttataggatctctggattcaagggtatcttcaaggtacagccctcaactatcccttcctttaagggaagtatctattctaggaggtaagatttatgcctagacacacagacatccgcaactgtaataaaaggcagaacatgcttgatgttacaaggatataaagataaaggctcacagatttaaagaagaagggtggtatggaaagatggaataaatggaggaagtgttatatggaggttgtgactgagccgtcccttgaagggtggatagaaatggggtggagaggagaggcgcacattcccaacagaaagggtgggatggcctgtaatgtattcacagggatgtgcgttggatttcaaaggagtagtgagttgagtttggctggagcaaggttttgcagggggaagaagtgggagagaaagttggaatggcaggaaggggataatgcgtggagcaccctgtattgggctgaagagtttgcatggcatttggtaggcaatggagggccgtttaaagtgtttgagtggagagagggtatactcagagctgctcttccaggcagcaggctagaggataaggtaggggagtcgaggctgcaggtagaggggcagttctgaggctgttgccactgtccaggcaagagagggaaggagtgattttcccagcagaaagccagagacaagggagccctgtgctgtgatctggatgggaagggtagaggttgtatttggaggcaagtagaagatgcccagcatgcacgcagaattagagttctgtctaagaaggtgctatttgaagctgtggaggtggagccattggggagagagagagcagagggaaggaacgatggagagctgaagacagacaggaggagggtaaaatggaggagacaatgacagagtagtcagggaggtagcgggagagccttactactgcagggtcttggggatcaaggcaggagagcatttccaggaggccgtcattgctgaatggagtcgtgaaagggaagatgggaactgagaagcccgctggattgaatgattgggctggagagtgggttcagagtgactgttgtcccgccgaactgtgcaatgatgaggcgtggtggttgtgaagcaggggcagcacatggggaccactctttcaagaattttggctgtgaataaaaggagaggggagggatttgttggcacatgagagattggaaatgcaagagaggggagcagatggggaagaaggcagtaggcagtggcgttggggatgggagtggaaggctcaaccccagcaaaggaggtagcactctgtcttcagaggcagacatgcagtaaagcaggggatgaggaaacgtagaggggcatggggggagctggaaaggaggacaggaggggcctcgggcaggggtgctgaatcctgggagggatgaggcagctggagtggggcctgagcttgaggagaccggaagagggaacggtcagtgggaaacactatgagacacccaaagaaatccacaagggtgcccaggtcccagaggcaccggccgaggtctggaagcatgagttaggggccaggagtgattggcattcctagagaaagcttccccagaaatgaatttggcaaagtgagacagctgctgactaggtctgggggcaaagggttctagctctgtaggaggcgtgccaagctcgagctggtgtgggagaatcaaggtggccagtgggatgcaggagccaggatgcatcgttttagtgggagtcagggagtctgaatcccccagcctgcctccatcccaggtggattagtcatcagaatagccaatgggccccttgagctctgagtggatgcacaaagggccaggtggactttctttggggagcataacaggaagaagatgacaaaagcctgggtggtggagatggtggcagtttaaggatgtgggcttaggactgtggactaggatgcacgtgtgtgtgtgtgtgtgtgtgtgtgtgtgtgtgcgcgcgtgtgcgtgcctgtatgtaagggcaggcacatgaagacagactttattggtttcacagtttggcctccagagggtcttctgggtgctgacaccaaagcagagagagctcgtggtgtgcagccctgaggtcacgtttgtgacgtggatggaaggaagcaggggatgggaggactggtggaggtggacgtcagacaccaggcttcccacagactgtcttgggcatcaaggacaaggaacctgcactgttaacctcagtcagggcgcaacggtagaaaggaggagtgatggggcaatcaagaccacaagtgccaacctcagcgcactcacctggagaatacttaccttcacactgttcccacccctgtctttccatgcccttccatccaaaccaagcccagcttcacagcctatgatattggctctctggagaaccggttagcctttgtggagtgttaagccctgcgattttatatccttataattatatcagaatatcaaattcctgagaacagaacattttgttatttttttcttcatcctctcccctgttgtaatcccacaagaaaaatgttacaaaccactggaaagcctctggttggatcccacttgagctttacaatgccttgatttccctgtaatcaagaaaaatatgatatcctgaatgtttcatgaaaggatgtgagtctttgatgccaaggacagtaacactccttgaatgccatggaaatatgctctgctgagtggctctgagcttacccttggtgtaggaaggtgtgaatgaccagcaggtaccccccagaccctgccccagtccctgtcacatatgcagaggactctggttgggaggggtctggtgtgggggagggttgtgagtggcctggaggcctttcccggaggcaggcagagaggcggtggctgcaaagacctagtgtctctgagttgaggaggctgggcttctgcacctcactcaaattctctgcagcggccagagcccctgcatccattcttatatgttggcattgttcccaaaagaggcacagttgttgacttctcatagatgccaattttcgtgatgtttgcaatactagctcctcatggtaaaatgcatagacagtccagtggccccaagtccttgcctttgttcttccatttttggctagggaagtagcactagtcttctgtgtgccttgcctggaaacagtgtgttatgacggccctcgtgggagttggcatggcaggccctgtggccaccatctcaccccgtctggcctcatctggaaacctacttgcagagtttggccttattctgatgaacctcaagggcagcgctgaccccagcttgatctcttgctgggtctgggcaacaaaaggctttgggatttttccttttttccactccagtgaaacttaggcggaatgcaatgttttcctctgagggtatcagttggggaatgaactcagagtccagatggacagggttccgcagttccagctgctgccatactcagacaactggtcctctgcatttctttggagtttgacttggctttaataaaatgaaggagaaaagaaaattttgaggaagaaaatgaccagaagaagaatgtccttgagttgagggaagccatggaatgggctggtatcctgagaagtggactcagctcttcttcagagacctgtagacatcacagcctgcaatcccatgcgtccttggccctcagactggtacagctagcatccctcctaatgatttttcctgggtctgtctgaaagggtgaggataaaatggcaatcagggtcatcaacttacatctttcaggcccagaaggaaatgaacagaaaagttaaaccaaagacggagccttatggaaagattcctctaacacttgggagccaaaccccaagttatttgacttgcatgtggggggtgtgcctgtacgtgtgtggatgtgcatttgtgtgtgtcagagagaaaataagaagcagaggaggagagagcagtgtgaccgagcttgtaacccctgaaagacagcatgtggtcacaagatacagccatatctgggagcaggaatttatgttttagatgtattgttatctgtcacattggcattttgttcgaaccatttaattttcccatgtctaggattctgcatctgaccttcctaccatatgaatctatttattcttgtaacctcacttataatgaccgttacttgagtatttcaaagggattgatggaaatatggcaggagaaaactttgtgtctggtcctttacgtactattggctgcattgggacattatagcatagactcaaatgcttaaagagtcttttcttttctttttttcttgagacggcgtcactctgttgtccaggctggagtgcagtcatgtgataatggctcacggcagcctcaaattcctggactcaagcaatcctcctgagtagctgggactacaagtgtctgccaccatgcctggatacattttaaattttttgtagaggcagggtctcactgtcttttccaggcttgtttcaaactcctggcctcaagtgatcttcccgccttggcctcccaaaatgctggcattataggcttgagccaccatgcccagccttaaagagcatttctgagctaaatttgcattaagaaagaatgtcttgggggtcgagcgggaagagtataaaagagccttgctccatgacttcaaaaatagtaccagagacaaaggactttgggtcttaaaggaatgaggatgtcccatgtttgcctggccttgcatatgaaactactgagagagtcttaaatcggggatgctttatcttacttgtggtaggtgtgactaagaagtcacacccattttcaagaaagtctttgagaggaagctttattgcatcttgcattccttttcttctttctgagtttctttcctagtactgaagcatatattttttagttctttcagcaatggtctatgagtggtaaacttcctcagtctttgtctgaaattttcttttattccttttggcttctcattctagaatgatagtttagtcaggtacaggattctgtgttagcagttatctttcttcagcagtttaaagatattccattatcttctggattctattgttgctgatgagaagtctgctgtcagtctaaatgaataatcaatattctaatttttgaaaagatatattagtgttacgcagttttacaatgatgtgttaattacatagattaaaatatattgctgggagttggtgagatacttcaacttgaagattcgtatcactcaccagttcttagtcattatctctttctttctttcccttcctttctttttttttctttctttctctcttcctttttctttctttattttctttctttcccttccttccttccttccttttctctctccttccttcctccttccttccctttcccctttccccttccctccctccctccctgcctgcctgccttccttccttctctctctccttccttccttctctttctccttccttccttcctccttccttccctttccccttcccttcctccctccctcccttccttccttccttctctttctccttccttcctccttccttccctttccccttcccccttcccgcttccccctcctccctccctccctccctccctccctccctccctgcctgcctgcctgcctgcctgcctgcctgcctgccttcctccttccctttgcttccctttcctttgacagggtctcactctgttgcccaggcttgagcacagtgagtacttggctcactgcagccttgacctcccaggctcaagcaatccttccacctcagcctcctgagtagctgggactggagatgtgcggcaccatgcccaactaattgtttcatttttagtagagatgagatgaggtcttgctatgttgccgaggctgatcttgaactcctaagctccagtgatgataccacctcagcttcttaaagtgctgggattataggcatgagctactaccgctcccagcctcacgatcttttcaaatattatctctcccctagtcactctattttgttcctctggaactctattattaaaacatgtattgatctttctcattttactctttcttttaaatgttctttcatattccatattttgttatctatcctctgctacactctggataatttcttctgctttgctttccagttcaccagtttccccctcatttgtatctgctgcttagcctttaaatgcatttgcaatttcaatgacattttattcctggaagttctactttttcaaatattttagttttttcatagagtatctttttccctttataatttccattgtgaatgatttcacaatatgtgcgtgaattctccattccttggtgctctgagcatggcctgccatactgccagaactggaaatttgaacctgtgttttatagtccactaataatactttactaccatcacaaggatgttgtgaagacaaatgagataatggatgtggacatgctttgaaagtattcgtatatttaccggaaaggggttataataaatatacctctgcttggcttgttaaataattctctcttgaatcagacatttaataaaactgtatttgtaaggggaaactcttcaaatgtatgcaacaagattatatatatacaaatatatatatatacaaaaaatatatatatatttggaaacagagtctcgctgtgtcacccaggctggagtgcagtgatgctatcttggctcactgcaacctccacgttccgggttcaagcagttctcctgccccagcctcctgagtagctgggactacaggcacacgccaccgtgcctggctaatttttttgtattttagtagagacggggtttcactgtgttgccctggctggtctcaaactcctgaggtcaggcaatccgcccgcctcggcctcccagagtgctaggattataggtatgagccactgcacccagcctgacaagataatatttaatagcttacctcctttattgcctcctattcatggcacctaatgatttctagtctgttcgatggaacttacttatttacagagtgttttaaactttcaagatgttagtccatggtttctccttttcaatgttttggtatataatttggtatatgaggtatatatcagatctacattaaaatatatttttggtacattaggtatctattaggtaaattaggttaggtgtattgggtatatgtcaggtatattaggctaactcattctactaccttcatttagggaaccgaagacagggcagactgtcagtcaacaatcaatcaatccatgttaaatgtgtgctcactgtgagcttggcactgtaatagccattggcagagggcataaacaagcataaccaattttgacagccatgtattaagtgtctactagataccagacggacacagtgatagatacgttgatgaataaaacagatgggcatctgctgtgctagagcggacagtggggccgctggctggaagtgcatcacacattctcagtggcggcaacacggaccattgttaaaccacactcgtttgagaagtgagtgaatctttcagctctcaaagtcttgctctgttttccatggagctccagtgcacaggcagataccctggctccatcaaggaccaagtgtttaaaaaaacgtggtccaacagatcagcagcttttggtataagggggtcaaatacaggatgaaacatgatattttgtgaggttgagtggctatctctatgtcactgaagtttgtctttggttgtcaccttacccttctgtgcccttccattgctgtggaacattctcacttcaccctcagggatctagggcttctcccttgtatctctccttccctctgctgaaacatgaccacagagaaagggcccttgctgcactgttcttgctcatcctggcaatgcagtgctggctgtgtcttggaggagctgggctggccctccaggccaactttgccaggagacagcacaggtgggaggagaacggtctttaggatgtagctgaaagccccacaggagcagagccacctggaacctgctcagagggcggctggaatcaactatttacatttttgtataaatttaagtcattttgtcttccctctgaagtatttgcatgttcagccttttctctaattgtgaaatgaaagactgtctcctttccaagaatttcaggcatcagcaaataagttcaggaggaattagtaagatggaaatcatcctgtggatgattttgcccagcctatgacttccagttaaatccggcaaaggagaaatctaagatgacaaataggtttcagatcctgtgtggatccaggactggttatggccacctggagtgctctgttgaaaggaccctgaaccattgcctaagctcctaggggaaagtgttcagtgatggattagtgatgtctgccataggcctaggcaggagtgaaggtaagcggcaccactgcaattctggccattcctcatagagtcagagagttgcttaggttgtattttatacagcaagttgattcaatcattgccatcaaacaaatacccaattcagtgaaaaaaaaatcagttgaagtatgtgttaggataatgtagataatgtaggaaaaaacatctgcccattaaaaattatattcttccctttttattcagctaggttggtaaatcatagacatatttttaaaggtgaattaatttgagagcttctaatttctgttctagactcctgaaggagtctgcaaataatactttatagttttactgcaccttcattctaaggatttttcaaaacatctcatgcatgttgtctcattgcattgtttacttgaccccatgacagatttgtttccagcatacaggtggggaaactgaggctcggagatgatctgacttgccgaaagttgaatggcaagtctgagcaggtgcaggcttggccctgctcttcttcctttgtaccatgaacttgttgcgactcctctggggtctcctctgggagatggaaatttccatccagggagtactgttattgataggccctctcagggggaggagactgccagtgccgtgactcaaaatagctgtctcttccctgctgaagatgttgccctttccgcagcaaatggatgaattagacccccctgcttcgataaaatactttagggtttatagggtggaaaattttgtttggaaatgaaaatagcccatagccatccataccctgaagctgtcagctaatgccatctgagtcacccctccccatcttctggcacctgtggggagcctccctgtggtctaccttgcggggtctgagcttggccatatttggcattctggagcctgctggctttggaagtgcctttcaacctgccaacacccacatggggacccggatcaagccatgtgtttaaatgactgggctgtggagggagctccagtggagacgtccaagggatgtagggccatttacttaacataaatcagttccctgagtgtgagtgtcttaatgcattccttcagttataaacagtttagagccatgacagccaacatcttttcacccccgctctccttagcccaggcctccatttggatttgtttctacagccagagactttgatgattgcaagggatgatagggaggccattctgaagacaaataaccattgtttatggagccctgactcctggggtggcagccgctcactgggtgcaggcatgggacctgctcatcagctcctggtgggcactaatctaagtgtgtcccatactctatcttgtttaatcttcccctcccattgatgaagtggggacctcttacattttacactttagagaaaattttacatttatggaaacccattttacagagaagaaacctgacgttcccagggcctcattaatttgctcaaggtcacacagctattgaatgggagagctggaatttgaacgtaggcagcttgttttctgagctctggcttctaaaacgctttgccatgtttatgttatttcctgtctaatttggaggctttgttgctgggcttttgagatctttcttgcttgcttaaatagcagtccataggttggcagaacaagcctgtggatactgccctgacctccggtaggaatgttcacagaagtggcgtcagtaccatggacttgtccttgtcccaacctcagatgtagaacagtggagccaggttcccagagtcctggcttgtgctgtgccccaggtttctcctgggagcggatgtgccagggcttgttcttgggagtctgcctgcacccatggagaactgacagtcagggaacccattttggtataaacaggggttggtatatttagaaataatctctagagactgtcatatgtgcttatctgcatgctcagagataaaagtcagggaggtgggtcagtaagaaaatgctggggttgacatccagttgacacatggctctttcccagggacacagggcagcctgatacatagggcctattttagggtctttcattatcggtttggaattgtcgctgtctgcactgcagtaaaacaagactcgcctggatctgcctttcctgacttgagaaaaaaagatccttacacaggcttgccttcgattcccatctttctccaacgtgctcacatgtgctagggttttttgttttctctctgcaacccacccgcagacgtaaccttctgattcactgtctaatttagggcagaaacttgcagagcaatgtcaaatgggtctgttttcacttctggatattacacatgcgtaatgttcttgctttgaaagcattccaagaggatacgataaataaaggggctcgtacacatacagctcagtggccacgtggctcacatgggtctgctgcttttgggagcgggccatgtttcttctccccttccttccctcgcctcactccctccctacctacctcccccctcccttcctcccttcacttttccccctcctttcttcctttgttaagcaaaataattttttcattcatgagcaaaaacagttttccaagggatgtgaaaaggcaacagagatggtatctctagtaccctgtatttttcagtcacaaaattatttgcctctggcttttttcccaagttcgattcccatttattctacacttgtatcggaaccattgctgtttttaatgggatgacacagttaaaatgagcccctgctttatagaatgggacttgttagacgggtcaccctggttggaaggcccgggagacctctggctctttaaacacgcagttgctgtgtgtgaaggacactgggttctgctatacggcactttctactgagtgggaaattgagacatggaacatgaaccagccacccctggaatccaggagagggctgaagcactggctggcacgtgccctggagcggacgccatgctgggctcactagctgtggcttcatgtttagcaatgaggtcgagcaacattcattacaacgcattgcccacttaagtttgatttaagatgtgtaccgtttatgatcaacagggaaatttaatttaggtacagctaatagctgcatgtgtgagtatgtgtgtggtaggttgatgagagtttcaggcatgttgtttaaatttgaacattagctaaccttctaggtaagtgtttcataatggggtatcccacatataaaaatgacattagggttcagactttgcaattgattgcacatctctcttttctaaatgttttcttctgtctttttcaagagaaaggggagatcttaatgtatgggtagtccaaggtacataatgttttatatcacagttttaaatttgtattactttttaaagaggaagatgaagtagtagtattggctagactgggttgagttgggatttgcaagtaaaaatagccttactttattgagtatctagtgtatgccaggccttatgtcaggaactttatgtgacttgtataacttaattctcacaacaaccctgtgttgtagatatgagtgtgaacaaaggagagaataggttcaaaatagctaatgccatggcagcccatagaagtttggagctggatatagggtttggggctgaggaggcaagagttacggcctcaggcctataaaaattgggggagctggaatggaacccttgcataaagcccagaaccttaaagagcttcctgttcagagaagggagatgagaaactctgtttactgctttggagtcaacagcaaggaagtgttctgtgtgtcctggggcttgctgtgtcacctttgagagagcaaaactctcgggctgtatcaaccacatgtgtggcacctgaattcatactacttgcatactataggaaatttaggataacaattaacataaaaatgaaatctaagacattgatagattaatggataaagaaaatgtggtgtatacatactgctgtggactgaatagtgtgtggaagcaaattcatgtgtggaagccctagcctccaatgtgatggtatttggggatagggcctttgggagttgattaggttcagatgaggccaggaggtgggccttcctgatgggattagtgcccttagaagaagaaacaccagagagcttgctctcactttctccctgccacgtgaggacacagagagaaggtggccatctgcaagccaaaaggagagccctcactagaaatccatctgctggcaccttgatcttggagttccagcctctagaactgtgaggaaataaatttttgtttcttaagccggctagtctatggtattttgctatgacagcctgagctgattaagatacatacagcggagtattattcagcctgaaaaaaagaaagaaatcctgtcatatgctacaacggggatgaaccttgaggacgttgtgctaagtgaaataagctggtcacagaaggatgaatactgcatgatcctatttatatgaggtatctaaagtagtcaaactcttagaagtagaattgtggttgccaagggctgaacgaggggtgcagagggggttgttcaatggatatagagtttcagttacacaagatgaaaaagttctagagatctgatcacaacaatgcacatatagttaacactagtttaactgtacacctaaaaacgcttatcgtggaagtcggtgtggcgattcctcagggatctagaactagaaataccatttgacccagccatcccattactgggtatatacccaaaggattataaatcatgctgctataaagacacatgcacacgtatgtttattgcggcactattcacaatagcaaagacttggaaccaacccaaatgtccaataatgatagactggaataagaaaatgtggcacatatacaccatggaatactatgcagccataaaaaatgatgagttcatgtcctttgtagggacatggatgaagctggaaaccatcattctcagcaaactatcacaaggacaaaaaaccaaacgccacatgttctcacttataggtgggaattgaacaatgagaacacatggacacaagaaggggtacatcacacaccaggggctgttgtggggtggggggaggggggagggatagcattaggagatatacctaatattaaatgaagagttaatgggtgcagcacaccaacatggcacatgtatacatatgtgacaaacctgcacgttgtgcacatgtaccctaaaacttaaaatataataataattaaaaaaaaatagttaagatggttgtcttagtcagtttggctgccataacaatttaccatagactgggtggcttaaacagcaagtactcatttctcacaattctggaggctgggaagtccaagatcatggtgctagcagatttgatatctggtgaggacctgcttcctggatgactgccttctcattgtctcctcactggcagagagttgagaactgaagagctctctcatggctctttctataagggcacgaatcccactcatgaggaaccatctttatgacctaattacctccagaaggccgcacctcctcataccatcacactgggagtccagtgcttcaacatataaattttggggagacacaaacatttagtccataacaatggtaaattttatatatatatttttgcctcaataacaagaaccccacaaaactagatctaggataactgatacccataggacccttcaaaaataatcacaaaaactctgaagccttcttccacagctcaggacccttcagacttttataaaataagcagtccaggctgaagatgagcttacagtaaaaaataatgtacacctcacaacagagttgaggaagagtcagcagatataacaaacagaattactaccttgaaaactgaagtcacaggacaatttgaggagaatataaaataaccttgtttaggctgggtgtggtggctcacacctgtaatcccaacactttgggaggctgaggcgggcagatcacttgaggccaggagttcaagaccagcctggccaacatggtgaaaccttgtctctactaaaaataacaaaaattatctgggcatggtggcacacacctatagtcccagctccctgggaggctgaggcaggagaatgttttgaacccaggaggcagaggttacagtgagctgagattgtgccactgcactccagactggatgacagagtgagaccctgtctcaaacaaaaaacaaaaacaaaaaaaacaaataaaataaccttgtttaaatcaaagagatggccgggcgtggtggcccatgcctgtaattccagcactttgagaagctgaggcgggtggatcacgaggtcaggagattgaggccatcctggctaacatggtgaaaccccatctctactaaaaatacaaaaaattagctggacatggtggcaggcgcctgtaatcccagctacttgggaggctgaggcaggagaatggcatgaacccgggaggcggagcttgcagtgagccaagatcgcgccactgcactccagcatgggcaacagagtgagactctgtctcaaaaaaaaaaacaaaaaacaaagagataaaggaagaaatagaaagcataataaaataatagtgctatatgaaaaaggagaagatttttaaaaagggcccaactgtatttttagaaatgaaaaacacatttaaataaataacttaatggatggattaaacattaggttagatatggtagaaggtaatatcagtggattggaagttagatctgaggaaattgcatagaatacagcccagatattaaaatattgcatatatgaaggagccattgaaagaattggtggaaagaatgaaaaaggttaacttacatctaaatggagttctaggaaacagtggagagaatgatgaaaaggcattactttaaaggataatgccaagaatgttttgaaatttaagaaagatattgatttttagattataccagcacactgagtattgagtagggtaattaaaaatacatctcgatctagacactcagtgtagaaaactgcttaaatgtcaaagaaaatcttaaaagcaagcagggagaaaagacagattatttctgtacaaacaccagacttcatcaaccacaacagacgccagaagacaatgaaataatatcttcaaagtgctcagtgaatatcaaactagaattctatacaaagctaaattatcattcaagagttaggatggaaagacatttttcggccaggtgcggtggctcacgcctgtaatcccaacactctgggaggctgaggtgggtggatcatgaggtcaggagatctagaccatcctggctaacacagtgaaaccccgtctctactaaaaaatacaaaaaattagccgagcatattggcgggcgcctgtagtccccgctactcgggaggctgaggcaggagaatggcgtgaacccgggaggtggagcttgcagtgagccgagatcgcgccactgcactccagcctgggcgacagagcgagactcagtctcaaaaaaaaaaaaaagacatttttcctataaacaaaggctgagagtatttacctctaaagtgatctgtgctgagagaactaccaagggacatgcttaataaagaagcattaattttttcatgaacctggcattgcaaatgtattttttttaagaagattaagatttaggatgattgaaatttaggatggggtgggtgcaaagatcagaatttaatgtgttctaaggtcttggtatttttcagggaaataatgaactattatttgaaatatttcataattcaaaagaaagcagacagaaatacccagacattgacctttgggcaccatcattatcactagaataacaactaatatatgcggagttcttactgtgtgccaaggtcttttatgatgttattccatttaatctcacagcaaccgtatgaaaaaggtaacgctgccattttgagaggtaagaaaacaggggggacaggggggatattcacttcagtgctgccatcactgagggtaacacacagcaatagtctgtgttccgtgaatgtggatgaaccaaaccaagctgaggttaaactataataagcaccttgctcgtgtcacatgttagagaagtgatgaaactgtggttctaactcaggcctgtctagcctgagactccctgctcttttccacagtgtctgcccctcactgtttccttctctgagtagacgagtcagacgctggccctgcacttcctgtgaattaatgccccgcttttcccctctcacacatgctttggtctgtgtgacttgtcccattcaggccctgatgtcctagtggtgtctttccaggtgtcatacagcccggcagcgtctcctgcatccttgctttgctttcaacaagactgggccggctgtcgctccccagtttctatgtggcagtcagacaacaccccccgcatggtgttgctaggaaatgcaggagcgatcatagcatttggagcaggggccctctctcctgcctcctgtacacacctgcctttaccatctgttcaggatgctcctggcaccttgaccctgccacactgagatgctccacctcattctagactgtggacctcagagcttgggttttcttaatggaggaattatcagggagaaaactggagcctggggttgctaagctacactggaccctgttctagtcacacactggagaagaggtgctgagagtgggatgtcttgcgttcaaggaattttcattcagtttcctatattttcaacaaaacgcctatctctgctcaagtctactttatatcgtatatttatatatagatatgcacacacatatgtgtacatacacacactgaataattaactcgttacgcctgtgaaaatagttttttggtggtgtttgttttttgcccctttggttcgtttaatcatggactgtgctgtttggtttcctgaattgccagttaatttcaggctaaggcagttaatcaggtagtcccacatggcctggcttgaacatagaaggaacagggagctctgatgcatttaggttctgattactggcttctcacacactgtcatcattctttggagggtttttcttgacctgagctcaaatcattccataccaaagggattcctgatttaaactgtcagtgttaaaaggcctggtggacagatggtgtcttacaggcaaacaaaggctcttggcttgctgctgatggaagccatggactcctccaatttctccttttcccccaaagaggccctggccgtagatcccagcattgccaggcagcctgtgttgttgaggactgtgtcctgtgttttggtggccaagagcatttcgactctcccaggggtgtgccagaggatcaggctatccctttcttagggacacagttgaggtgggtggaaacagcatgtaccttgccattggagaagctgggtttatgctgtgattcacccagccatctcaggttgtgctcttgggagagtctttgatcctcagtttccccagctgtagattggtgatatttgtctccacattgtaaagagaatttatgatactgaagaaaatgctgtgtaaactttaaaacaatacaaatgtaaggcattgctactctcagtgcttggaggatgttttgtgggaagttaatggcccttgctctgccatatttcagtgccaagaaccacaagagctgtcaataaatactgatgaatgatgagggggagaagccatttgactctgtggaagccagtgctttatatattaaatgcatgtattcattggatcattcattgagcaaatatttattgagttcctactaaacacgaggcactgggaataaaacactgaataaaacaagtggaatcatgactaatgtttcctctggctttcacagagttagaaaaattaggtgtgttgttttcataaaattaaattattctatatatataaaggattttaaaatgctgatagtatatctgtcctcctctttggtattaaaatgtctcttcttttgtgtgatgatggtgatagttgatttttgaaaaacttttcacatagtcaaatttgaaaaggtgttgttagttgtccttgaaatccagcttggggatgactgatctagcccaactccccacccagggcaggcctgtctttagcattctcaacaagtggtcatctagtttctacttggatagttccagggaaggggacctcactaacttcaacacgcagccattcaaatgttaaacagccattatcttttgagtgttcttttttatattaagtggaaatctaccatcctataacttctgctcatcaagcttgagtcctccatctggagcaaacaaaatatatttacttcattttcttatagccctccagatttttgaagcagactattatgtttcttccaagcatattttccagacttcttgtccccactttctttacccacgttctcccgtggcttcattcctctccctcttgccccacctctgctggtcagcttctacttgccagtgttcctcttgcagtctgttccccagaagggacacagggcttcagctgtgtgccgacttggatggagtgctcagcctgctatgtccctgattcagagctctgaatgcagattaaggaagaagtaaagattgcgtttgcctttttggcagctgtgctctactgttgactcatattgagtcgtagcctactaaaatccctagggtccttgtcatataaattgctgataaggcaagccagggttccacctaccctatgtttatgcagtgaattttttcatctaagtatagtcctttacattgtgcttattctatttcatctcgttagtgtggaccatagtttcagcttgttgaggtcatttttattctgactgaaacttccaatttactagctattcctcccagatttgtgtcagcagcacatttggcaaatttgtcttcatccaactttttaatttagtgttcaaaaggctagagccaaagacagagccttgggtcacatcagtagagacctcccagggtaaatgtatcagtgagtcaatccctaggcatctgtgcatagaatcagtgcacctatgaatgtgtcaatcatcagtgcatctctggatcagccaactgcagaccctcctgagtgtattaatcacactggtgatgtgagttctattttcagactcttctacttctcattttttaaggcaatgtcaaccttttccattattgaaccaccattggtaggattatgactttcaaatttaccttttcagcccagatatctgtctcttttacatttttaattttttaattgaatagctgcagaatgttttaatttttcaaagtaaatgcactatctccacgtcctctgaaaccttcttctctttctgtgatcaacttggtgccaccaagttggccaagccaggtacctggaagccattctcagtgcttttgctttcttctcactccacagctaattcaattgagtggggtaattataaatacccttagctgttctaagagattctacctccttaatacctcataatacacccctcggactctgatccgtcttgcctatacaactgtaagaaccttctaactagattctgtactcctggcctgactccttctagccctcatcctgtactgtgtcaccaggaaacaaaagcctcactcagattatgtcagtgtactgcactgaggcctttgctagcaccctgtccactgtaaatgataggtggtcctgcatcgtcttactgttctcagcttttactgtttcttctaccaaccctacacttcagatgtactgtctactgctggttcccaactgcagcatgtaaattcatgctttggatatgccgttccctgtacctgggatgcctttcactccttctagtcaactgacttctactgcttctttaggattcagatcaagcatcccctcctttgggacttcttccgcagatgcagcgggttgggcatcccttttcagcaccactgcagcactctaagtgtacccattggaaaactcatcactacatggtagactgtttgtctgcctctcccacttggtggagggcccttgcagggcaatgcctgtgctctgtttaccactggagccacagctcttagcacatagtagtaggcacttgggatttgttgaaaaaatggatgaatggaggatttgacaaatcatttccaatttgccttgaactgagtgaccattacttcccttttagcattactctatgattctgcatctgtggcatccctttgatgtactggccatataattccattcaaaaagtgaaagtgtacttgacattgattaggttttttctccatatatgttccaagtcatccgatttctaatctattctaggcttgttaaactccatttttaccacttagttgcatgtttgtttctctgatcctgtattagttagggaaggctagcagctgttacaagcagcccaaaatctcactggcttgatgcaatacgagtttaattttcagttacgtgacagtccagtgcagttactcctggtcaggtggccttccacatggtgactcagtgagcatggtccatttcattctgcagggcttctctctttgtggtctttgacgttttctccattcagctaatgtatggagaaagagaagcaattgcaggtgaggaaacagagggatggtgcgtgggagcttctcactggcccggcctggactagcacaccatcacttctgtgcacatttcactggccagaacttagtcatatggtcatgtctgactgccacggcagctggaaaatgtaggctagctgtgaccccaggaagaaaaagggaacacagatatttgtgagcatgaacagttgccattgcacccattcttagattctggacctcgtgattcccagggctgccttccagagctcttcttagtcagggcattttctgtgctccaagccctttgatcttctatctcccaggctgggtttttttatctctgccctttgcctctctgttctctcaagccctcttggccattggtacctcatttctcttttcttgctggcctgtctgatcttgactcctcatcgctccagtttcccagcagctgatcctcacttgctcacgtgtctgggactggaccatctgattcttggtacctgcttgccattgccagatgtgttcctcagggacagcccatcccattccaagtcctggcacaatgggggagagtcctttcactctgtcctgtgctttgaagtccttcctatgagtacagagtatggatttgaactctgtttttagagataattagagaactgagggagttacagtgagagccactgggagatgtgggctttgggaagccaaaagtatccatgctgtatgtcctgaagcagataagcctgaagttaatggataatctgtacgtatatgtagaaaaattgcaaaggtggtgatgctagagtacatgtttttttgttactctgaaaaagaagaaagtgtcacattttagtgtgagaattttaggtaagagacaaagaaaaaaatcataaattccagaatttgggatgccattatggagaggttaagtaatgtgctttcctagaaaaaaatgggagtggaagagcccatctcagaaggctttgcagtgacctgctgggtggcaggagatggataagcaagctcaaaatctcttcttctgccatgattctttgaaaaaaataaaaaagctgggtgttctgcttttgactctgaccttgtttgagagatgctcatactgaacgtgtttgtctctgggtaatggttccggatgattttgtaaatggaacgggtattgtcttgtaaggtttcaggaactatgatgcctgagttccattacctgttttgtcacccactcattctgcaggttactcacttgggtaggccacttctccattcttttgatggtctgcttatctattaagtgggaatgggaacaggatgaattttcaggaggtttgaatgagaagtaattcatgtttctaacacgcttcagaatacataagtacaacatcctatgggaattcaaaatacaattacacttttgttaggtttatttctccgtatgctggttctttggttcttgccttgagacatgcagctttttgcaaatgctgtttcctagaaatagctctttaaatgtgtgtgcctctcctagtgagggctgaaatggtaccctctgctgggttggaggctggggaggaaggagaggaggctgaaagtcaacaccctcaggccagggccctaactctagaggccgtgaacacggtggttagagcacgtactttgctgtcaggctgcttggtttgccggaggcttggcacaagctggttagtccctctgtgcctcagtgttctcatctgtgaagtgggcgtcataataatgcctaccttatgggggtgctgagaggattaaataaatcaatgtatgtaaaatcatgagaacagggtctggcccacagggagtactctgcaagtattaactcttatttttaaacaggtattttagaaagatgctttgcctcagatgcgttctccttggttacttgctgacgaaacaacctcctcccatgtatctgaagggcctcagagcagccttcgtgcttgcagacatgcggagaaggaccttcccactgtcctcgggtgggctcagcttacgttaagagatgaccatcaacacacggggaaagcaatttttcagttcataggatttagtcggactggttactatatgtcactgcagcgtggagggaatatcagaggactccactgcattaggcgggctgggcacttgcttgccgttgatattcttaaatgaatcacgttgttaaatgcggagggagggctgtgcgcgcagacctatattcttacttctgggagaccctgtggggctctgagactttgcacttcttagtccaaccaacttgaagtggtcccttgctcccagtgattcattctgcttttactgctgattctgtgctcttgagggattcatggttcgtgcacacgtggaagggtggggcagtgggtaaaggagtgacattgcatgagtgtatagacaatagctgcactgtgtcacttacagcctgggcttcttccgtaagccctaaaccacccctgtctgtccccccgaccctgaggtaagccattgatgtgggggcgagtggtagactaagcatccctttggaagaaaaggattaatttgcatgaagctaggaacacacttttgaaatattaaatacaacagaggtctgctgagcacctcctatgtgtaaagcaccatgctggacgccgtgcgaggtacttggagtagtaagacttgactcctgtcctcaacgagctcaagatctcttgggggagacaaacacaggaataaaacaggttgtgatgaacatggcaacagagcgtggtgacaggatgccataagaatcttggggctctgccgggcccatccggggcatgttatgtacccagagacttgacattttttaatttttaaaaactgtggtaaaaagtacgtaacacagttttcaatctgaatcatttttaagtgttacagttcagtagtgttaaatatattgttgtggaacacatctccagaactttttcatcttgaaaaattgtaactggctgggcgcggtggctgacacctgtaatcccagcacttggggaggctgaggtgggcggatcacaaggtcgggagatcgagaccagcctggccaacatagtgaaacccctactaaaaatacaaaaaattagccgggcgtggtggcaggcgcctgtagtcccagctacttgggaggctgaggcaggagaatggcgtgaacccgggaggcggaggttgcggtgagctgcgatcatgccattgcactccagcctgggtgacagtgtgagactccgtctcaaaggaaaaaaaagaaatgaaaaattgtaactacacacccattaaacaactccccatttctccctgcctccagcccctggcaaccaccattctactctctgtttttatgcatttgactactttagatacctgatgttaaagtggaatcattgaatatttgtcctttgtgactggtttatttcacgtagcataatggactgaaagttcatctgtcttacagtgtgtgtcagaatttcattgcttttaaaggctgaataatagtccattttatggatagactactttttttttttttttttttttttttgagatggagtcttgctctgtcacccaggctggagtgcagtggcatgatctcggctcactgcaacctcggtctcccaggttcaaatgattctcctgcctcagcctcctgagtagctgggattacaggtgtgcactaccctgcctggctaatttttgtattcttagtagagacagggtttcaccatgttggccaggctggtcttgaactcctgacctcaagtgatctgctcgccttggcctcccaaagtgctgggattacaggcatgagccaccgtgcccagccacggatagattatattttgtttgtccattcttctgtcaatggacatttggacttgttattgtgaatagtactgctatgaacctgggcatgcaaatatctcttggaaatcctgctttgagttcttttggatacatatccagaagtaggattgctggatcatgtagtagttctatttttaattttctgaggaatcgccatacagttttccacggtggctgctccattttactttcccgccaacagtgcttaacgttcttattcctccacatcctcgctggctcttgttaatttctattttttgatagcagccatcctaatgggtgtgaagtgatagctcatggtggtttggatttgtgtttctctgatgatcagtgatgttggccatgtgtatatcatcttggagaaatagctattcaagtcttttgcccattttaacatcaatactcgaggatttctctttctgctctgcccatatcctcagatatcgggactggcttgcttctgcagagggggccagatcaaccctgcaccagcagaggcatagggcagcaggggcttctccctctgcaagtcccaaaagtatgcgggttacttgtccccattggccatataactagcacccctctggactgcttagctctgcccatcctgctgtttctaccttgcgatgatttacatggatgagaggctgggtatgttcatttcttcttgcttcagtattaatacattaccacagacttagtggcttaaaacaacacagttttattatcttatatttttgaaggtcagatgtctaaaatgggtctgcagggctgcaatacttctggaggcacttggaagactgtttccttaccttttccagctctagagaatgcccacattccttggctcatggccctctcctctacctgcaaagagaacaatgtagcatcttttgctctcctctcgtgccttcctcttccgaggacccttgtgatgacctcagacccacatggataatcccatctcaacatccttaacttaatcacattggcaaagtttcttttgccacataaggtaacttattcacaagtaccagggatgaggacaaggacgtgtctgggggtgatggtcattattcagcccacactgggcctctgctatgtggaaggcaggggtaagagcatcttttgtagggagggttcttattctgtgccttctggacttaaactttaccctgggttagtaggaacagcatctagggatctgaaggcttgggcttgactttggtttggctttgcctgggtgggaacctaggggacaagaggcttgctttctctgagctcctgtgacctcaccttttaaaggaggtgggtgggccaggtgctctttaggtccctctcgctctgccatatcctcacctgctctcatttctcatgtggtgtcctcacattgccttttcccattggctatggagagactgaggctgccctgaagggtagaagaggaaagttatatgaaactttggggaaatggctcctgggcaccagctaattcaaaggaggacaggaatagcaggaatgaagggcgcgaaggcactgctttattgcccgcctccttcccccagcccctacataaagcatccttggaacaaacaaatggaaatactgcacaccctgtaagcctaattgggtcatacataacttgtacagtgatttcctatgaaacttcaattagccccctcttccagttcaaacctgataagctcaaatatttgtaaactgccagccagatggaagatgtgtctccttgtggcttggatatcctgtaactcaatatgtgtggtgactggcatgggcatccgtattcaaggaagggaaggagcctcgcaccctggacgtggcattgaggggcaagaaaaggtgttgtttgttctctttgggacaggtggcccgactctcctctggagcaggctgggagaagttgccaaggacagttggcgtccttcagtggctggggaaggagagggtgactcttgggtccttgtgtcattcttcatcacttccaactcaagggagaatgttgacttgaaatagttaacctttagtaagcatgcattagtattaatgcaccctatttaatccttattatattatccctgttttaccgataagaaagctggggatcaaagaggttaagttaacttagcaaagatcacatggtcaacaagtggagagctgagactcaaatggaaatgagtctcatgtctaattaaatgtcgaatttcaaaatgcatctctttctactatgccacatcatatcttctggcctcttcccttcacctaaaaccattgcccttgggagtggaatgtggagctgtgaatgaaggaggaggcagtgagccacagcctggaggaggtgacggctgcaaaccccgcactctggcagaggccagtcaaccgctttggaatgccaggctgcctggagctaactgtgggccaatcttgtgttggccactttcgtttcaggcccaaatttagttacagagtcagaaagagcaaggcccctggcagggcaaagttaccagagagtgtacgtgggtatgtgtctgtgtgggtgactatgcagtggggcctctccttcccagggaggctagtggcttcttgtggcagggtagtatcttacacagccgtgcctcccactcccctgtaccagtggagcccctggtaggcctgcaccctgatgcttcttgaccacttgtcctatgctaggcattgtgaggccacatagtggaatgagacaggactctgctctcagggttatgttggagcaggaggagaagttacatggatataagaaaggcagtgaccaaggccatgagctgcacagatggaagtgggtatgctttgtgcctccgtgttccacgctggcaacatgtgttcgtacctgtactcgtgtacctgcgtgcatgtactcaagggtgactgtggggtcatgtgggggacttgcctcctgagccccttaccctgggcaggtggtggctgctcctttccctcatcgcggagcactttacacaactgtatgatcatgggtgatctggggcccatgggggcagcttcgtaactctttggctcaactgggaagttggagcaggtatttgctaccctgagtgtgagccctaagaccatagttttatgctggaaaccgcccctctttcatgacactcagtgcctagtgcctgcagttgcaggctgccaggggaccacccaataacaaagctatgttgaggccatctgtgtttcgtgctgaaaggacatttttcttcagcagcatactgagtgcatagagcagaccaaagcagacatcccattttccccagtaacctccgcatgtgtgaaaactgggcagctgtcaccttgagaaagatgctgctgggtcaccccaaagattccacatacatgctgttgggtgcctccttgtatgtgtgtagctgttattagccccatttcacaggtgggaaaggcaaaggcaggaaggctgccaaagagcctggtattcaagggaaatgaatgagcaggcagttgtaatctcagtggcatcccactccacaatctgaagtgcatccccaagggttagggagagcagcttaagaaaccagcagacatttcagaagctgagccctatggacagtgcacatcccatgctcaaggagttccggtggtcctagcccattagccacgtttgttgagactcagcggagcacccccagtaagtggctgccctattcaggagtacttttcagattcaagtctttatcaatattaagggaggaaattcaggggtggaggtgggcgagcaggggcctcctctcttttgggaagcctatttctttggccagcatgtcctgaatgataaacttctccagcacccactagtgaattgcagaatcactgaatgccagaaaagtgcataggaccttagaggtcatttggtgaacaccctcagtttacagatgaggtgactgaagcacagagagggagataaacttgtctagagtcacacagctgcttagtgggaaagggaggaagagactcatgcattcagccccactcaaaaaagtgactcaagagggagagccgaccaggaagtgggagtggctgggactgtctgtgcttcaggggaaatgttgggggttgtgaaatgcagccactctggatggggccatgctggggtgcctacaagggccttccaggtgctcagcccttcctgtgcctctccttcattgctgcaggccccaggggctcaaccccctttaacaataacaaaatgagaccatttaatgactacttccccctgagaacttagtcgatggctgcaccatgctaagtgcttataaatgtttcaagactcttgtcacaactcagagatatctaagtctcagaaacgtaaataagttgcccgggctcacagggctagtaaatggcaatacagacgggaacttagggctcctgcttttgctgttaaccaccagatcacactatctcttcttggaggtggctgctgtaattcactcaatgtgcttgcagtcctgtccccataaaactcagtatttctagatcctgcactcccacctgtccactttttctttcctgtcttcatagaccagaagcaggtccaatttgtcttaaaggttatgaccctcctaattcctgtggggacacagacagaggagaggaacagagatagggggacagagtcacagagatgatcgagtgttacagcgtttttacagctctaggttctgctctgtgaatcctgactccattctgagatgaaaaatggtagtgccattgacttctgccttctgctttcgggttcttaaagatggacttctcctgacctccccttcttctcccttttggcccagactttcagtgcagttgaggctgcgggagaatccgggcagcactgtaagtgccctcggcccgagtcaggccatccagtgtttcgccagtccttcaaggaccctggaggagaagggctaggcagggtcggataccactggctccagagagtgtcagaaaaacctaagcagaaagaagagaagggggagtgcaggacataggaagatggcaaacagacgcccacagaagaggagagtgcatgcatcctatgaggacggagcgtggatttatgatgccagagaaactggaaggtttaggagtggagaggtcagtcttagcctgggtcccactggatggaggctgtgtgcttctctctgccttggtttcatcattcaccatcattgggaataatgtcttttgtctccttacttaaagtgatcaggcactgagttgaaatcagcattccttcagcaaacacttcttttcatactggctgtgtgccaggctctgggctaggcacagagccacagagatgagcacgtcatggcctgccctggagatactcacaggtgcccagagtggagcttttggacaggactgaaactgtgcagagatgaggggttgatctaacttcccatcaaaccagctctcgcagccagaggtccgatgcctgatttttaacggcgcttgagaaaactgttgatatatttgaaggtgagtctggttttactcagttgtgaaggcatgtttgtgcatgtgcacatatgatttatttgatatttgaaaacaatttatgaccagaattctttgcatccttctctgggcctatgtcatgtgctgagggcttgccggaagcacttgtatagggtagagacttgtcctgccacatatctctcctctggactggcctaaagtctatcctcccatctccttcctgaaggacagcttccaaatgccttcccctctggttcttttcctgaggacagacctctttctctttcctcttgggatgttcttccaagtattctgagtctctttggctttttaaaacacattaaattgaggtaactttttgttatggtaaaatatatgcaacataaaaattatcattttaaccattttaagtgtacaatttagtggcattaagtacgttcaccatgttgtataaccatcaagcactatctgtctctagaactttttgtcattccaaaccaaaactttataaccattaactcccattttctcttcctccccagccctggcaaactctattctactttctctctttacaactattctaggtacctcatataagtagaattattcaatacatgttcttgtgtgtatggcttacttcactcagcaccatgtcctcaaggctcatccatgttgtagcctgtagcagtattgtattctttttaaggctgaataatactccattgtatggatagaccacactatgtttgcccatccatttgttgacggacacttgggttgtttctatcttttgtctctttggataatgctgctatggacatgggtgtacaagtatctgttcaagtcctcgccttcaattcttttgggtatatacccagaaatggaattgctggttcatatggtaattttatgtttaatttttaaatttttatttatttatttttttgagatggagtcttgctctgtcacccaggctggagtgcagtggcgcgatctcggctcactgcaagctccgcctcccaggttcacaccattctcctgcctcagcctcccgtgtagctgggactacaggcgcctgccaccacgcccagctaatttttttgtatttttagtagagacggggtttcaccatgttagccaggatagtctcgatctcctgaccttgtgatccgcccgcctcgacctcccaaagtgctgggattacagatgtgagccaccgcgcctggccacatttaatttttttgaggaactttcatcctgttttccatagcggttgcaccattttacattccccaccagcaacacatgaagtttccaatttttccacatgattgccaatacttgttattttctgattttttcgataatagccgtcctaaggggtttgaagagccatctctggctttgaggatttccatgtaaattacagtgagccgccggggctctctgtgtggctgttcctagctgggggccccttgggttgagcttgccctgtaagcacaggtagattggaggcagccgctcagcatagctgagtgtgctctcaggccacctctgcagctgggagagcccagccatgggcagagcggggtggctgctgggctgcacctggttcagcccctgctttgagatcagtaggggaggagatccaggcaccagacaactgggagtgggggatgaggccggctggagaggctgaggggagcagtgagatgtctggaccaatgagttctagaacctgagctgtctgaactagaaggacctcgtacggtatctggtggagcctcctcattctatggaagagattgagagccagagaaggaacgtgatttgtctgagtgcgcagagcaaatgagtgatgggcctggggctggaattcagatttactgacttctggcctagttcttttcccaccgaacttggggaggagtcaagataacttcatgtctatatgaagtttgatatttaccaaggaatgacagcctcaggggagacttgcatattttttcgttgccttctaccttcttgtctgcctgctgtctggtggggttttgtagggattaatcagataaatagctttgacttttctaaatgaaagaagcattgtattttatacaaagcattgttattaaacggcctgtgagtgtgtagaaataagctgatgctgtttcttttgtcgtgccttagtgagaattagagacttccaggagtggcacaaataggctgtgtgtgggtacatttgtgtatgtaatgtttttagtgtgtacatatgcagggtgacccaccttccccatacagtgcgatcccctgacaatggaagaatttcagagccttttactaatagaggatccttgaggaatgcagcaccattttcaaggatctctggaattctgtgttctgaattatctggagagatccattaatatctgtgtatgggatatagcgattgtttttaagagttggttgcttaacatggaaaatgtgcttctgggaaaaagagttttaaaaacccagctttcatgttttattttacttcattgaaatgaggttcttcttgcgtgccccgaggctttatctctggaatgatttttactaaataattcttcatattcaggtagtactttcatagacataatcccttgtagtcttcaccattgttctgtgaggggtgtggtatcatctcagttttacagatggggacattgaggcgtggagagcatgtgtcacttggcactggtagcactgctcaccgtgtgaggggcggccgtagagctagggcctgcttgctgaagccacgtggctgtgtggctggggaagccctccctccctggaacctggttctgaggttatgtgcatggtgcactctggaccggggcttagtctcgctgccgctcactctgggcgcatagccctgctcatgcttcatggaggcgagcagataggaaacagaatggtttttaaacaagacgaaaagaaaaaggaaaagatgaagagaaaaaggaaaggatcttgcccatgtttctcagctaattttcaaaccaaccgtcttactgtgttactttaccctgaacctagatccttctgcagagaaccacagttggaaacccaggagtgcaagtggccctctgtccagagcttaggctggagttgagacggctgccgagaggtgtgctgagttcttatgggacttcttgcttctttctctgtggctgcagggagctgcctctgtttgcctgcagtgctggggatgaggaggaagtggcctcaggcaggttgggaggcaggcggcctgtctgtccccttccagaggcaggaatctggcactggggtggccacagtcatattggaagtatacttaagcaacaaaaccaaactgtaacttggttttctttctgattaccaaataattacttattgcacagaattttggaaaattaatcacaaaaatacctagtaccatttattatatattgtattttctcttactgtggccacgccagtgccagattcttgcccagccacggacagtcccactctggaagggggcagacacgctgcctgcctgccaacctgcctgaggccgcttccccattacccccagcaccacagggaaacacaggcagctccttgcagctctgtcctgagagtgtgatgttcattaactcatttgattgtcacacagtgctatgagataggcagtgttattatctgctttttacaagtgaggaagctgaggcacagagaggctaggtaccttttcaagtctcacagctagcaactgacagaggctcgaatttggatccattctgcctggtttccaggtccatgcccctgagtgccaggctgtactgcctctcagcacgtgtatattacctgacacttaaaaataacactagtgtttccttctagtatttcttctatgaaaacaaacataaaattggatgggggccgggtgcagtggctcacacctgtaatcctagcacttttggaggctgaggtgggtggatcacctgaggtcaggacttcgagaccagcctggccaacatggcaaaatcccatctctagtaaaaatacaaaaattagctgggtgtggtggcacgtgcctgtaatcccagctacttgggaggctgaggaaggaattccttgaaggaggttcaaggaattgcttgaacccgggaggcagaagatgcagtgagccaagattgcaccactacactccagcctgggagacagagcgagactccatctcaaaaaaaaaaaaacaaaaaaaaaaaacaacaaaaattggatgggagcctgatgcaggaggatcacttgagcctaggggttcaggactggcctgggcaacatagccctgtttctaccaaaaaaaaaaaaaaaaaaaaaaaaattagctgggcacggtgactcatgcctgtagtcccagctacttgggaggctaaggtgggaggattgcttgagcccagggaggttgaggctgcagtgagctgtgatcacggcactgcattccagcctgagtgacagaacgagactgtctcaaaaaaagaaaaaaaggtcgggggcagtggctcatacctgtaatcctagcactttgggaggccaaggtggatggattgcttgagcccaggagttggagaccagcctgggcaacagggtgtctctactaaaaacaaaacaaaaatctgaggtaggaggatcacctgagtctgggggagtcgtggctgcagtgagccgtgattctgccactgcagtctagcctgggcgacaagggtgagacccatctcaaaaaaaaaaaaaaaagaaaaaagaaaaaaaattgtggtcccattgtatatacttttgtggaccctgtttttgcttaatattagactgtggaaacaatttctgtattatttcatatttttcaaaatgtaattttcatggcttcctaaaatgctgtcagtggatgtgcattgatttctctaaccatttctccagtgacgggcttctaggttgtcttcaatttggtactggtatcattcacaccgtgacgagtacccaggcgcagagctttgccagactcttggattagttctctcagggtagctcctgagaagggtggtgaatgttggaatttcttaacaactcccaccagagtgctgaactgctgtcctgacagggtggagcagaccacgcttcccccgggcaaagtgcaggaggctctaggaggggttaggggctcaacctccccctcccaggtggggctgtgggagctacagctccatcgtcgtcctcaccgtgcagaacagaaatgcacgctccgcctccctgagtgtcaggcctgtgggtccgtgagctccgagcctcaggagtaggggcagcctctgctgcagggaccactgtgccatcccactgagtcccgtgacccacgaggctgggtgttcagaggcacgaggtggagtgcgagcaggtcctgccggttcccaagggtgcccgcccagttcagtgggtgacagtgaatgcgcagggtgagtgaggattagctgagggagccattctctcggatggtggcagaaggaggctggggccaccgagaatactaaaaactgccctcacaaggtcgctgcctcctgtgttctagttctgctgcctgggaaagctgtactcaccctctgcctctgccctcctaccaataaactgggccagagcaacagaacccctgcatcatgggaccaaagtccaagtaattactattatggggaaaaaagccttgggacagttacgttttgagtcatccttttattcaacacattggtagtgtgcacataccacactccaggctgccctgggctctgagaatacagtggtgcaaaacaaaggctcatgcttcctgggacttccctcctgttgggaacaagaaacacatattcatttaaccaatgataatagatacattgaacatatggcaaacatactaatttaaaataacggaagagcatcttccccgtatacttctgcacggaaacctttgaaggccaaattaaagttctgtaaaagaacttccatgcagccaatgtgttttgagtgcctcctggcaacactgtactaggatttgaggccacagtgctgtttcctgctctcaaggagcttgtgagttgctgggaaaataagagaaggacccaagtattagactttaactcatctcaggcgttcagcagctgaaggaaaggggaggctgagccagtgtctgggtcccctcagtgtggtacctggctctggggcattcttccccactgtctgcacaccctcccttctccccagacatcagcaacctgaaggatttctcctttttgtagatggctgtctgtcctcaggcaggcagattattttttattttttttaattacacttaaattctggggtacatgtgcagaatgtgcttgtttgttacataggtatagacatgccgtggtggtttgcttcgcccatcaacccatcatctacatttgtatttctcctaatgctatccctcccctatccccgtactccccgaaaggccctggtgtatgatgttccttaccctgtgtccatgtgttctcattgttcaactggccacgtatgagtgagaacacacagtgtttggttttctgttcttgcactagtttgctgagaatgatgttttccagcatcatccatgtccctgcaaaggacatgaactcatccttttttatggctgcatagtattccatggcatatatgtgccacattttctttatccagtctatcattgatgggcatttgggttggttccaagtctttgctattgtgaacggtgccgcagtaaacatatgtgtgcatgtgtgtttatagtagaatgatttataatcctttggctatatacccagtaatgggattgctgggtcaaatggtatttctagttctagttccttgaggaatcgccacactgtcttccacaatggttgaactaatttacactctcaccaacagtgtaaaagtgttcctatttctccacatcctttccagcatctgttgtttcctgagtttttaatgataaccattctaactggcatgagatggtacctcattgtggttttgatttgcatttctttaatgaccagtgatgatgagctttttttatatagttgcctgcataaatgtcttcttttgagaagtgtctgttcatatcctttacctagtttttgatgggatttttttttcttgtaaatctgtttaagttctttgtagattctggatattagcgctttgtcagatgagtagattgtaaaaattttcttccattctgtaggttgcctgttcactcagatgataatttcttttggtgtgcagaagctcttcagtttaatcagatcccatttgtctattctggcttttgttgccattgcttttggtgttttagtcatgaagtctttgcccatgccaatgtccttaatggtattgcctaggttttcttctagggtttttacggttttaggtcttaagtttaagtctttaatccatcttaagttaatttttgtataaggtataaggaagggatccagtttcagctttccgcatatggctagccaatatttccaacaccatttattaaatagggaatcctttccccattgcttgtttttgtcagatttgtgaaagatcagatggttgtagatgtgtggcattatttctgagggcctctgttctgttccattggtctatatatctgttttggtaccagtaccatgccgttttggttactgtagccttgtagatagtttgaagtcaggtagcgtgatgcccccagctttgctctttctgcttaggattgtcttggctatgcgggctcttttttggttccatatgaaatttaaagtagttttttccaattctgtgaggaaagtcaacggtagcttgataaggatagcattatatctataaattactttgggcagtatggccattttgatattgattcttcctatctatgagcatggaatgttttcccatttgtttgtgtcctctcttatttccttgaacagtggtttgtagttctccttgaagaggtccttcacatcccttgtaagttgtattcctaggtattttattctctttgttgcagttgtgaatgggagttcactcatgatttggctgtctgtccgttattggtgtataggaatgcttgtgatttttgcacattgattttgtatcctgagactttgctgaagttgcttatcagcttaaggagatttggggctgagacaatggagttttctaaatatataatcatgttatctgcaaacagagacaatttgacttcctctgtttgtatttgaataccctttatttctttctcttgcctgattgccctggccagaacttccaatactatgttgaataggagtggtgagagagggcatccttgtcttgtgccagctttcaaagggaatgcttccagtttttgcccattccgtaatctctgctgccacactaaaaaagttgaaatgctgatttttcaataaatgtgaattaatccttaactagggcctgtaatttagatttgctatcaccaggtgctgataggcgccttagttcaagtagcaagaggtcttgacttccttcctctccatgcttggaaataagtggaggaagcatttggttattatggcaaaaattatggcaatttgtcatcttcagttgaaggccgtggcttagctgtgtgtctgtcagtttgttttcttccctatggtctctgatgtcaatatgagagccctcgagtgccaagggcgttatatcagggtcctctcaccgaagcagtgttggccttgtggtcatcgcaggtggtttgcttccaggcgttccttacgaggcttccttttcctttctttaccttctttcagccagctgccccataaataacagagagcaagtgtggtttactggatcactagcaggtgtgaatgctgtagcttttccgcttttcccattggcttgggcctctgaagtgctccaggctctttgccttctccagccttcatgtagtcatcagaggcaggtgggttgtaggacagaaaagatacagttgtatttgagggagtactcgtcagttgggttggggagagagccgcagatctcctggcgccctcacggtctccttgttttggagcacatttgactgctgtggtcatggggcctgttctgggcaccccacctctcatgaactgtgtctgtagcaggatgggggagaggaggaccggcagagtgacagaatgctgctggaaatggtgtgaaaatagctcaggtaggaggaagcgcagtcagatgcggcatggcggcgggcgcatcgggaaaccactgggcgcccaccccggggagggtttccacctcagctgggcgtcctgaagccactgggtgcccaccccggggagggtttccacctcagctgggcatcctgaagccactgggcgcccaccccggggagggtttccacctcagctgggcatcgtgaagccactgggcgcccaccccggggagggtttccacctcagctgggcgtcctgaagccactgggcgcccaccccggggagggtttccacctcagctgggcatcctgaagccactgggcgcccaccctggggagggtttccacctcagctgggcatcgtgaagccactgggcgcccaccccggggagggtttccacctcagctgggcgtcctgaagccactgggcgcccaccccggggagggtttccacctcagctggggcgtcctgaagccactgggcgcccaccccggggagggtttccacctcagctggggcgtcctgaagccactgggcgcccaccctggagaaggtttccacctcagctgggcgtcctgaagccactgggcgcccaccctggagagggtttccacctgagctgggcgtcctgaagccactgggcgcccaccctggagagagtttccacctcagctgggcgtcctgaagccactgggtgcccaccccggagagggtttccacctgagctgggcgtcctgaagccactgggcgcccaccccggggaggatttctacctcatctggggcgtcctgaagccactgggcacccaccccggggagggtttccacctcagctgggcatcgtgaagccactgggcgcccaccccggggagggtttccacctgagctgggcgtcctgaagccactgggcgcccaccctggggagggtttccacctcagctggggtgtcctgaagccactgggagcccaccccggggagggtttccacctcagctgggtgtcctgaagccactgggcgcccaccctggagagggtttccacctcagctgggcatcctgaagccactgggtgctcaccctggagagggtttccacctcagctgggcatcctgaagccactgggcgcccaccccggggagggtttccacctcagctggggcgtcctgaagccactgggcgcccaccccggggagggtttccacctcagctgggcgtcctgaagccactgggtgctcaccctggagagggtttccacctcagctgggcgtcctgaagccactgggtgctcaccccggggagggtttccacctcagctgggcgtcctgaagccactgggcgcccaccctggagagggtttccacctcagctgggcatcctgaagccactgggcgcccaccccggggagggtttccacctcagctggggcgtcctgaagccactgggcgcccaccccggggagggtttccacctcagctggggtgtcctgaagccactgggtgcccaccccggggaggttttccacctcagctggggtgtcctgaaaccactgggtgctcaccccagggagggtttccacttcagctggggtgtcctgaagccactgggtgcccaccccggggagggtttccacctcagctggggtgtcctgaagccactgggtgctcaccctggagagggtttccacctcagctggggtgtcctgaagccgctgggcgtccttaagccactgggcgcccaccctggagagagtttccacctcagctgggcgtcctgaagccactgggtgctcaccctggagagggtttccacctcagctggggtgtgctgaaaccactgggcgcccaccccggggagggtttccacctcagctgggcgtcctgaagccactgggtgctcaccctggagagggtttccacctcagctggggtgtgctgaaaccactgggcgcccaccccggggagggtttccacctcagctgggcgtcctgaagccactgggtgctcaccctggagagggtttccacctcagctggggtgtcctgaggatttctctcgcttaggctggaggggaatgccagcttccccatttggccattgagaagaaagtcatctctcatttatgtgatgaaaatattagacactgaaaaaggacttttggtttctacattgttttttgggtcttagactctcttatgctttgaaaatatgtctttttgcatagggtggttaattcttgatcagaaaatccacccacccatcaacatctgaattcattcgctattgcctttttaaaaagttttcccacaattttgaattcagtgctctgctcgttatcttccccacttctcacatttctttgtcaccatgctcttcccacaaggactttgtcttaatacagcacaacctgtgttgcccagtgtgggcgcctctagccacatgtgactatctgaatgtaccgtaattgaaaattaagtaaaatgcaaaatgcattttgtcagacgtgctagctacatttcaggtgctcaggagctgcgtatgactggtagcaagggctccgtaatccagcctaggattatagagcatttctattactgtaaatgttgtattggacagtgttgctatagactggtctatatatctcagtcagggttcaggcctataacagaaacttctgtagccgtgtttagaggaaagatagtacaggaatttaggggcttatacaataattggaaatgctgcaagagcaggctttaggccgggtctgtgggaatgattcccaaaacagtgctgcagaacaggccccccgagggaactgcggttcgggtacaattatgaggctgggggacctggaagccactgtgccaagggctggctctgggatcacaccgccttatgcatgatccaggaatcaggaagccactggtgtggccctgccagccagatacctgcaaaatagatgcttccccacctgacgtagttttgattcagttcttgattggcaaaagttgtgtcaggaattctcgctccaagggaggttgggagccattgtgtttagccctctggcccctgcagtccagcggggcaccgtaggaggagggtggaagagctgctgagaccgcaagtttaccagcctcccacccaccacatggtgctcagcacacaccatccttccagagaggagtgccactggggttgagatgacagggcctcgggttatcgtctgagatcgagagacggtgtcctctctgttcacgtcctccagctatctgtgtactgcaatagatagggaagattaatggcccagctttctagtcattgggcctttagtgggtggagaaagtccggtttctgttccaggttgtctgcgatactcttaaagggaatgcaggccccttgtcactacagcaagatgacagacagcaagagccaagtgggcttctgggtgacatgttggcctgagagaaggcatttcctttgccctgcagagattgctcagtggtcaggactttagggagaaatttatttgcagttcttccctttctaggtgtgagctgcggctgctcaccctctctaaatcgatgtgggtgtctgtgtctacgaaggtggaggagtgacctgcttttgtgctcacagaaggcaccaaggccaagcagggtgactgctgctgaagcaggctggcagccccagaccttttcctactcacggctgattggggggtccctttccaatgccaggggcgttgggcatgtttattcaacggtggcatggaggcagggaagtggggagaacactggcagctagtgtttgagttctgcttgtttggagtgggggcttgaagaagggatcacctgagcccaaacctgaaacgtgagaagggattgcctagcaaagggcagagggaagaacatgaaggacattctaagtacatgcaaaggcactgcggcaggcaagagctgagcatgtctgaggcatgaaatgagccactgtgtcaggagtgcattggaccgggcccagaggggagtgaggtgaactcagagaagtgggccagggccagtctgtgcaggtgttgtaagctgttgacaaggagtttggattttgaagggatctaactaggggaatgacagggcccaatttacgagttctgtttttaaaaggtgactttggctgctgcatggagattggcttggggatggccaagagtggactgaggaaaaggtcagggtggctactgcagcacttgtgggcaagagataggtagtggcctggactaggatggagatcttcctcacaacccctttccttagaacttctcccccatggttacatccaagaaatcagtagaagagcatatggcttgagaataagcccattctttaggggtggctggactgactccagcagtgttccttctacagtgtcactgtagtccaccttcacctgtatcatgacagcattatcgttacagtccttagcaaactgtgttgagcattttctgggatatggccctgaatcaggtgcagaaatagagatggattaaagaaaaaaaaattgtttcatcactgaacaccttccaagtccccagcaccaagcccctcactcacaggggacacccaggaggcacatgccactgactcctaacttggactcctcacttggacccttgcagagcagaatgacacgaggctggccagaccgtgctggggtcctgccctcatcctggtccccagcagcagcacctgggtgcaggaggaggacgcagatgctgtcttcaggggagctgggccatttgacaggtgggaggcattttcttatgactggggatgaggtcactgctgggggcacctacctgttggtgtgtggcctgatctgcgaggcagctgctcagggccttgttcaggggtgggagcatccgtggaaacagcccagtcagacagagccagagcagacttaaatggtggcatcctttcagctggcagccaggaggctgagctttgaatcagctttataatttgaaaattgatctctttgcattgggtggtgatttcgtgctaacaaaagccgtcagggacacaatgctgcctgccctaccttcatggcaccactctggattcaaaacattgagccagagatggggattttccactcctgggagtcttcggtagttgtgccaccctgttgtgggtgacccggagatactggtagaacatttcaagtgctcaggagccacatatgactggtagccagggtattggacagcctaggattatagaacgtttccattactgtaagcattgtattagacagtgttgctacagactggtctatatgtctgaggtcagggtggggatctaccgcagtgggtgggaaaattacttggagaaggggaggcccaggcccggaggtggtcagtcccgagaggccatacctgtctcacccgagaggccacacctgtctcacccgagaggccacacctgtctcacccgagaggccatacctgtctgtctcacctgtgtgcggctctgcactcctgtgcagggccctagtcatgtcatgggaccgcagcaatgcgcagagctgccaggaccaaaatagtgtaggttgttttcttggcctctggctagggagaggttgacattccatttttccccatgggctggttcatatgtgctttctccagatggtgtgctccagaaaggtccttgcgctctgggaatggtttacaatataaataaggtccctcatggagttttgggagggctcagaaggcagcccaccaggatgtggttttcagagctgccccagggctctgcacagccagctgccgtcttggtagcttctacctcgtgctccgggtgcagggatgctcccctcacgcagcttttctgggtggtggatgtgttctcaggctggggcttcctgccctctttccaagtgttgtccccaaactcctgggactcttggtttttggaactggcagcccgtatgagatggggggattaagggcaatgcaggggggtgagtacaaagattaaggtctggggacagccgtctcaggggaggcgtgagctgtggagggcttaccatgagtgaattgggggctgggaatgccaacagttggggacagggcagcttttatgtatctgagggaaaaggagaagttagtctgggaactaaaatagtctattaaattttgtcagtgccaaacagagagtctaggaagaaaaaattatataccacagattgaatggagcaaaattagagttccagccttccctggcaagccagagaagcaggagttgctcagtggctccagtacagcagatggaaacagggcgctttccacttttgcctaagaggcgccccgaggttactgcgggggcaggtggtgtagtggatgctgtcacgtggagatcatagtaaacagaaagaatgttcttggggtcagaaatccagccccttgtatctcgaggcctggagaagcccaggaggaggcgtgcaccttgtctgtcaccatgtacacgagcacatgtgtgcgtgcatgtggagtgtgtgagagagggctgaggaggcaggggtagagtctagcagctcaccgtgagccctgtgcctgctgcagcaaccctccgtcgccccattctgtgacctttagtgagtcagacactcctttgtcttcttatgtgttaaatggagacacgcatgcttgctgggtgttcaagcagttctcatgctttgggtgccttcattaattccaatgcactctttacatcttttcctgctggatcttatgagaaaggttaaggtcccggccttattggggtcttcctcacgttaggcttgggatctacacagtgagtgcagggaggacagggacgagttacaggagagatgagacgtctcattgtagggagtgtcacgtcctccgtgagcctgatgttctgtttaatgcagtttatccctggggcagagaacaggaggaaggtgaagggaatatatatggtgaggtgagagtcggtgtcacattgagaatgtggctatgaactgggtgtggcagagaggcaattttccaggccttgaggagtggaggcggggctgtaatgctacaggggccagatggcggtagagcaggtggcaactgttgcgggacaggaggcagctgaccagctggtctccaagaggacctgaggggtcttcttgggatcatgcaggggtggtagctatgtggcatgagtgatgccattccctgccctttgtgcccatggtgggcaacactaatctatcatcctcagagtcccttaagtatatagcattgtggacagtgatgtcaatcaattggcataaaagttgaaacttattgtctgtcactggtgtgatggaaaggatatagactggagtccagcagaaatgacagccccaccaggtccaagctttgggcacctaccaagcatattagctcgtttttcggttgcaagggacagagacccaattcacattagctttagctaagtcacttaagtcacttaaacatcacagtgtgtgggggaaaatcacttggagaaggggaggctcagccagccttgcagtacagccctaatggaggtcagccccaagaggccacacctgtctcacctgcctcacctgcgtgtggctcaggtaagggctaacttcaggtgtggctggatgaggaatctggtgaggttgctcgggctctgcctctggggcaggctctctctaggtgaaaatgttcacatggctaagccaggtcatgtgctcttcacaggttcctgtggggacggggtggaggtgggggtgataggttctggaaagcaggtcacatggggagcaaagttatcttggaggtcaaacatagaaggatcagcccaagataagagttggggaggtggctgggagaggcgccaagtgttcatctgtgtcttaacaggtgaggagagggagggggtcaataaggttgagccagcaaccttaggacccagcagcttccctggaagaccctgtgcacatggaccagaaaaggccactgtgggcggccttgggtgtcatgtatgtgcaactggtctggctgcttcggccacagtctctgggcagctgaagtgtcctcagatgccaacctcaccgcccacagtagcaccctcttatctgcggcttttcttgatcctgcggcacctggccaattgactagcggtaccacgtctcaaggtcatgcatgtgttctgggagattcaggtttgggccaggctgagctgatcgcttggcaaaccttacagactctagagcgaggcatccagcctaacaggccaaagagtgtttgccaagcatatgtgctgtcttagggacagtctcagaggcttcgttgcctagacaccagagcagggcagctgtccctgcgcaggttggagccctgggttgcactggttccaatcaggtttccttcctgacactgtccctctcccctaccccatcaacccctgccactcacagctccttttcccagatagcaaatgctgtctaatgaatcaccccaaaacaaagtggctcacaacagcagacaccctgttactgctcagtctctgtggctcaggaattcaggaagttcttgtgtgggtcagtaattcaaaaagttactgatttggggcagtcctgacttggggtctctcctggggtggcagtcagatggtgattggagcagctgggggctggccagggctccctcttgccacatggcctctctgttgaggctagtctgggcttcctcacagcatggcagctcagggctgaaaggctgccttgtgtgggggctggcttcctccaggacgaccatccagagacagtcagggggatgcaacgtggctttttttttaacctatccttggaagtcacacagtgtcacttttgctgtactttattggtaaaacagtcaccaaaggctgacctcatttcaagaggagggcctagatctttctcaatgaaaagggatgtcagatataaagggatttgttgacatgatttaaaaccatcacagctcccctggcccctcctggtcaaccaacacttaaagcccagatggctttgaggtagctggatgtgaccttactctagtccagcccttctcattttattatatttatttttgtttattggaactcaggtgcagagagttgagtgaatcatactccagttcattgtacgttttccatcattgattcatgcagtgacctctcatattcactcactcattcatttatgcttcctccttgcccctgtatcttatgctcattttcctcctcaccttccttaaacaatcattctattcgatttcatgaatatcctttcatttgcatgggttcttaaaatatgtattttaatttctaggtaatgtgttgtgttgtatctgtttctgctgaggtccatacgtgctgtaatgcacggatctcatctcttgcccacctaaggtgaggcaaggagactagagcggagtgacacgcccaaggtcacccagctaaaccaggaccgcaacgatcctggccctcttccctcagcatctcacactcatgtttccacgtgccacctcctaaccgcctgcaatagcttgaaataaggttttgaaaaaattgtgaatctggggtccagagagtgtcggaagtgcccctgttttctatctagtaactgttgtgttcttttctcttttgccacaggttccaactatgggagcccacgccccgcccatgccaacatgaatgccaatgcggcagcggggctggcccctgagcacatccccaccccgggggctgccctgtcgtggcaggcggccatcgacgcagcccggcaggctaagctgatgggcagcgctggcaatgcgaccatctccacagtcagctccacgcagcggaagcggcagcaatatgggaaacccaagaagcagggcagcaccacggccacacgcccgccccgagccctgctctgcctgaccctgaagaaccccatccggagggcctgcatcagcattgtcgaatggaaatatcctttgttcaccgggctgggcatgctcctgggacctgcacgctgggtccagccctccgaggctccctgggccacgagctgtgtcagctgtgctgggctacaaacggggcctcgggcctactgcatctgcatcactggggtgctgtgaaatgcagagttctgggccccgccctagactggatgaatcagaatatctggggacggggcccagcaatctgcttgtataataagctgcctgggttgggtttttgttttttgtttttttcatataataagcaacatttgagaaaatcagcctaagaagttatgaaatatcatctcctgtagctgagcttgcccaggggcccactcatgtgttggggtaacagtcgttagttacatgctgcctcattcccttctttcccttctgtgccatggcgctggatgctttcacggccttccctctctctagggtgaaggggctcaggagatggaagagcgtagtggtcagggcccctggctgttggctggagggccctgaagcagtggttctcagccctgattgcacattagagtctcctggaaagttataacaaactacagaccactcagttccacctaggcataaaaacaaacaaacaaaaaacaacaacggaaaactctctgggtaattctaatgtgcagacaaagttgagaacactgtctggaagtgttctgtttgtccatatagaaacaagcaaatgggtccttcagaaacagtggctttgaagggatgggcgctcgctgtggagttacaagccccttacttcatcagaatcctggggctgtagaaattgggaaggacttttttttttttttttttgagacggagtctcgctctgtcacccaggctggagtgcagtggtgccgtctcggctcactgcaagctcctgggttcgcaccattgtcctgcctcagcctcctgtatagccgggaccacaggtgcccgccaccacgctcggctattcttttttgtatttttagtagaaacggggtttcaccgtgttagccaggatggtctcgatctcctaacctcgtgatctgcctgcctcggcctcccaaagtgttgggattacaggtgtaatctgccaccgtgcccagcccagaaaggacctttaagtgctgaagttcctcccccacttccacgagtgatgaaattgagccccacaggagaggctccccagggtcatgtggtcaggaacagatgggactagaaccctggtactgactgtgggaatttttataataaggattcctccaggcaggactgctgtgtctctcaagggccaggatgggagcattaggcttcatcgatgagtttctatggaaagatttaaaagtctcaggtactggttgaaagaaggtagcctagagataaagaaagtttctattgagacagaaatgttctataaatgtttgaggccaggtgcggtggctcacgcctgtaatcccagcactttgggaagccaaggcaggtggatcacctgaggtcaggagttcgagaccagcctggccaacatgaggtgaaaccttatctctgctaataatacaaaaattagccaggcgttggggcacatgccagtaattccagctgctcgggaggctgaggcaagagaattgcttgaactcgggacgaagaggttgcagtgagctgagatcatgccactgcactccagcctgaggaaaagagtgaaactctgtctcaaataaataaataaataaatataaatgtttgagcccctcaacttaaaagtattttaagaaaatgcattttaaaacaagtggctgcagctgcctgagtggccaagcatggttttagtgcccggggtactggatgggagactaggctttagtcagccccataggactgcttgcatatctgctcacggtggagtcagggagtgggagagctgagggccctgcaggtcaggcacccctgagagaagggcagcaaggcccagagaagacaaagggcttgccctaaatcacgcagctggcaactgacagagctggacttcaaatccaggttcccctgaccccgaagtccatgcccatcccacaccccatgcatccatagtactgggtaggactaggcaggtactagtagatactaggtgggaccggtgaggtcttaggaggatgctcagggcctgcagtccaggtgcactgggacacgccggacctggatccgggcctaacacctactccctgggtgctgtggccacccctccgggggagtgtgccttcccacctggaggagaggaagggggcccagccttagcagtgccaggtgggtggcattccaagattgcttgggaagactggctggacagggaaggagatagcctggagtactagccagccagttcttcttgaagaagtggaatccgaccctgtcattaggaagggaactcagcttaaaaagtaatctgggcctcaaaaggcgacacagagcacttcccagggcttacctgggttctctgcttttcagccagtggcttttcttctctgcctgattggtttttacacatgatcttctctggcattagcccagtgcctttagcatgaagtgaaggatggataggtggagagtctgaatgaggggaggggaactgatagtgccagaaaccccaagctcagctgtgccccactgtggtggaggcaatgaagtgacatgttctgggtgtgtgtgcacgggtctggtttggctgggttgttgcatccttgtcccgatggggagagcacaggcaccagctgatggaatgaaactggccagcctgtgggctcggtgtcactttcctaagcaggcgagaaaaggtttgggaggcaagaggtggcgtggtaggagggctaaaagaactgcctatgaaggcttcaaggtaactttagagtggatcagtatagaatagtccttaacactgagactgcctgagcttggatcccatcctactacttgctctgtgacctggcacaagttaacgtctgacccttctgtgcctcagttttctcatttagaaagtggggatcacaagcgtacattccacacagagcatttctgttgggccgtaagaatgtgcctggcactgagcaagctcttggcagaggtcagcttctgtccttactgtcaccagcaccagcatcagcgtctgtctcccatcatcactacttgtgcctcatccaacacaagggcagcagaatgtaaaagcttagtccgtctgggttccggtccaggctctgctatatgccagcttggggtcttggactggctgctttacttttcacccctgcaaagttgggagattgacaggtccactgtgtggcatcttttttgatatcaaggtggacatagaaaatgttctacaggaaaatggatcctcagaagtacccacaggactagggagactagtgctaagataatcactcgggttcctcccagttcagaattctgtgacgctggcccagggctgccccttaacacgtcagaaggccgtctgtggcaggggagtgaacactggacttggtgatcgggaaatccgggctctagtctcagctggtcattaacttgctgtggggccttgggaaagttcctcaggctctctgggcctcagagggttagactagatcatctctaaggtctctttctgcctcaatattcactaactttgtgagtatggatttccctgagagaattatggtggtcccttcaccccggatctccacccctctctgtcttcctcctcctcctcctgtgagactccatgaactgggctgcaaacttggcagtgggagcggggtaggtgggagtggagctggaagagcatagacgggcccttcctgggaagcttccccttgctggccttccatggagggtgtggggtggtcccgtcggaaggggtattatcacattagctcatttttctcttgagagcgtgtcctgccctgaaaatgtgatgaagaagtcagggcatgggaacctctgcctgcactactactggtgagggaaccttgggctgtcccactagagcccagcacacaccaaggaaaaatcaggaggccttggaatcaaagctttgcctgctgaagcgggacctctgcagaccagaggggtttctatgctgtctgtgagactcagccttaaagaggagacagctttccttccctacactcaggacggaccccctgccgtactcttgggggtcttcaggatctctggaacctgccagagaatgagagagaagaaatggaaaccactcttaaccttagtttaaaagattaaaaataaaatctccaaatttcaatgaaacccagagaaagtctctctgtcttggaatcctgttccacccatgtcccccgttccaggtgggcgtgggcccacaggccgttcggcataaactgtgaagaaacggggtgcttggcgcaggccatgctctttagaggcaacctcaggcacacattggggagaatgaagaccaatgcaatctaaataaatgaaaggaggggaacaagtttttagaaatctgtgtttactctggcacgcgactggcctccactgcttttgacatattagggaaaattttggcggggacccactagaagcacttaaaaaggcatatgtttcttttcagaatacaaggggcttggaatgcattgtttaaacaaaattcttatgaatctttgattcattttaaaaaatatgtagattatgtttgtttcacttgtactttctgtggcattaacttccttgactccctttctcagaccatttgaaataattattttactgactatttttgccaattgtgtggccttagcgatctatattccctttccagaagatgattccaacgccaccaattccaacctggtaagtccaccatcctcaagtctctgctttttcactcgatggagaactgcgttcagatcacatagatgcatggaatgtgggagagaagtgagacgtgtgtttggcatgtgcaggagccctgcagagctcacatcccgagtgctgttttactctttattcaaatcagcacctgtctcattccggcctgttttccaaaagaatattccagttaggtggtggtgagctctgtgtgtgtgtgtgtgtgtgtgtgtgtgtgtgtgtgtgtgtttagtagcaaatcccgtgactgctacaaaatgtgctgcaaaagttgtgagtgcaggtgttcgctgcagcgaacatctgttcttggattgtgttgtatttcctttgaatgtctttgttccattggtggggtttgctcaggtgatctggagtgttgctgcacgataaataatttctaggaagcttttaggaacatttgcttttgcagccaacatgtattattgagttagaagggccttattttattgggaaaggcggctttccatttggattgttgaggggccagctctggcaatttggggttagaattggtccatggaaaaagtggagagtgtgtttacttttggctgagcttgaagtcattacaaagacttttgctccatctgggcatgtgaggaaaagagctctggaatgcagttggcaaaattggggcactccaggatgcctctgcaaaaggcatgcagggaaaatcccgtctctttctccccctccattgcagagacaccgtcactctccacgtgatttccacatggcgtgtttggtcatcagagccaccgtctttcccctgccgtcagtaccttcctttaattactgagatggaaccgtccaatgagatggtttttaaaagaagcaggcagcttataggattctcctttccacagctgctgggctgatgccatcacagggtggttcttgtattttgtaacctttgacattttcttgggccctttcagcaaaaaaaaatatgatgcacgttttaacttctcagctgtcgccccagttttttcaggtaaccgctgatgcatagcaggtaaggtgttcaccgcctgcgggctgtggtgtcttgtggctcggcttggggccctttgttggggacaggctccaaaaatttcaaagctgggcacaccactgagtgatggcatggccagagtcggaaggcagagcatcggccgccgtccgtgaggccatccgaagcgtgacctcatctcttaaggggcaagaaatctttactgtgtcaaaataaatacaagccaaagtgtctccctgaagcaggaactccttcccttggttccatttcttccctgtgtagccacctccttcctctgccatggtcctcccaaccctcctacagtttcacatttaatctgcaacttttaaagaggagccttcgttccacatagaatccgtatcttgttcttaagctgatgacacttggggctgctcaaggcccatgcagtggtgaaggtgtgtagaggagtttggtttttcttaggtcctgagatggccacatgtagccccttcacccctcggtttccaggaggattaagggagccacttggcttgctgagctagagggaagccctgggctggctgagacccctcaactctggacctcctggaggcagaggggctcgtaggagaggacaagaggtcaccctggacttcttctggagctggagtgaggttgctgtgtacagatgaggtgggagggatggcaggtttttatcacatcacagagtgatggaagaattctaaaggaggtggtggggctgcttgcacaactgtgtaactttaccaaacatcatcgaattgtgtacttacagggggtgaactttatggtatggtaatgatacctcaaaaaagctgcagatgacttctcattctctgcattccacaatgtcgcacttcccctggggcagtgaatgctgccagctgaaggtggggggtggcatcagaaaacccttaaaacagatgaataaatacgacctcatatcagctaataaatcagaacacgattctgccccatggagaaacccatcgcgagtgctgtgacccggcctcccggtccttgctctctacagcatcttgaagctgcagcatctttgcagatgccccctttacaaagcacattctccccttgcttcttccagcctctcctcctgtgtctacacgaacgtttactaggcttttgtcctgagccctctgattttcttcttctgcactctccctttggggagctcatctgtgtccacagatttaagttacctttccaagtaaattgttgctaagactgacatctccagtgctaagcctttccaaaggcctggccccatatttcccgcattggagaggcctgtggaccggtgcagcgaccgctgaggcctgcacatcattacaacccgagagaactccaactgtgcagaccccagctcccctgcggatctgattcacatttagtagttctggggcatggtctggggatgcgcatcaaaaaatttcctcgcagggatgccgatgattagtcagctttgggaacaaccggcctcttgggcagagcaaaatttgagttggacagacctgacttcaaatcttggcttctccactttaagattaagtctgggccgggcgcagtggcccatgcctgtaatcccagcactttgggaggttgaggcaggtggatcatgaggtcaggagatcgagaccagcctggctaacacggtaaaaccccatctctactaaaaatacaaaaaattagccaggcgtggtggcgggcacctgtagtcccagctactcaggaggctgaggcaggagaatggtgtgaacgtgggaggcggagcttgcagtgagccgagatcgcgccaccgcactccagcctgggtgacagaaggagactccatctcaaaaaaaaaaaaaaaaaaaaaaggttaagtctgaatcttagtctgaggttatttagtctttccaaacctcagttccccagcttgtaaaatggaagtgacctcagagggttctagggaagagtagggcgggcagtgacaattatatgtgccaggatgtcttgccaatacctcaaacaagccccaaatagaactcattctctctcccaccacacgaccctgtccccctgaagaaaacgaaacatagcccaggtgaatgctgctccttttcttttcccttggccgggttgatggcattgctggccttgctgtcacatggaaccatctctgacatcttcttccccttgccatgcccatctgagcaggaatccagtcttggagattgtaatttgcaatgtatcacatttagctttctttctattctcaaagtcatttgttcagacttcctgtgccttagtttcttcatttataaaatggaaataacgataatgacagtacctacctcatagggttgttgtgaagattaaatgagccaaaatatgtaaagcccttaggagagcaccttagtaagggcgaagtgttgggtcttgttaatagtgctggatactattgttattattgtcatcatcatcatccttgtcaacctaacccaggccctgttgcctttttcatggactcttacagtcacctccttcctgctgtcctccctctggtctctccttccactggtctagctcgtgtgtgtgtgtgtgtgtgtgtgtgtgtgtgtgtgtgtgtgcagtcatttgccaaacatctataccaacagataggcactatgattaatagggaagatgaaactgtaaacagttgtttcaaatagtgaaaggtcttataaagggccagggtgtcagggtggaagaactgattcattttgctgtagagaaaggattaatggcaagtttcacataggttgacatatttgcattgcgtctctcaagaagaggatgccataagagatacttcaggttgaagtgtactcatgtgcaaaggcatgagtatacatgtggtcacattctttaggaccagaggaaggggtgctggttttgaggggatgagaagagccaggtgatgggggcttgatggcccatgcaaactgttggacttaactgcaggtgaggaggaggctcgaaggctttaacggcagaggagtgctcttgcagcatgaggaagatggctcagacggaggcctcactgtttgtgaagagaaaaagaaagcttgccagagtccagatggtggtgacaataaggatagagagggggcagtggatttaggaggcaagcttgcctggacgggtaaccagttggatatcatgggtggcggagagagctggctcccaggatggtgatacgaggagccaggtgcccttggccaggagaaagacttcaggaggaaggtcatatttgaggggcagggaatgatgcgtacgattagggattgtcaagtggaggagcccgtggagcgtgaggctggggatgtcctaccggcggtcgacaggagcctgcaacccaggagactgtttatgctgaggatggagacttgggggcaacaggaggagagacacaaggagaagctgtaggtatggcccagagcacctgcatcagggtggagtgggagggtagcagtgaccacagccagaccctggagaacagtgacgtttgcagagggtggaggaagaggagcaaaggaaggtcatacaccacgtgtcaggaaggcttagcctgagaggtaggaggggaacctgctgagagtggagtcttagaagctaagggaacagagagtttaagatattcaagaggggctggttggtagttcaaaatcgtggctcatggcaactcaaggccaatgacaagaggattggcctgactgagaagagctgagcttagggccaaaagtacgagaagaggatattgatctgtgtctgtacccctatggaggccctgaagtagtaggtgcatgacaactgtttgctgaggttcaatgcttgaaacattcccattgttgtgccagagtgggatgccccaaatcacttatgtaccccgaaaatgaagcttgagaaatcctccattagtttcatagctttttttaaaaaattaaagaattgcgatttcagagccctactctgagaaacagcaaagaagagatgctgatgcacctgaagcaggtggctctcaacccctgtggcataagttcatagagatgattaaaatgcatgttcccaggccctgctcccagagattctgactctggagtgggccctaggagtttgaatttttaataagctcccctggggttctgatgcaagtggtcctgggctgctctttgagaacagtgacctagaatgttcctcatggtgtgattggatccaccttcagctccctccgcaatcagctctgtctacccacaggttccctttaggatccaagcagaaagacgacacacgtcaactgctgagagctttcccactccattgggttcaagaataatctatttagcaaagcacactcacactgtcacagaattagaaaagattcttcttttcacacacacttgcaaattcacatctgtgcttgctcctgctctcagattccctcgcaaacgcatcggcttccacccattctgtcgcaggccctttcctttctcccacttatttttctaacactttgctttcttctgtttccaagagatgaaaagtattccagaatagagttttttttttaaaagatctctctctcattatttaaataaaagtctgtttgttgtatgctccatctaacatacacttttgcaccaaaatccatcatctttgttatcttttcctcatgctagtgaagcataatgaaagctgaactgggccatgacatgacaattctttctttagatttagtgctgttattggcaatgccacctctatgcagcacatcgtttataatatagcagctgtaacccctgtctaccaagagctattacctgttaggtagattgtctgatgtctgttgaacaagctctgcaagcggagccgactcattgtgtgtggaaaacttcctgtcctctgcataccctgaagcccacgaagacttggcttgagttgaaatattaagagaatatatttggcatttgaccttgtgcaaagaacagtgcatgtactttctggagcaagagccaagcttgaagtggaggtggagagaagacgggatgaggccatcaaagggatcatcttttggctgggctttcttccttcagaggttgtgagaggagaagccgtccgtcagaggggcttgagctagactaggaagaaggttgagatgtcagatttgcccatttattggtgtaaaattggggcaaccagagttgcctcataacctggctgagaggattaagtgagttaccataagtaaacttcacaggacatgcccagcacaggcgaatgtgtgttgctctttggaactctaagccaggctgagggcccctcccctctgcctggtccctgggggtaagtcacagtcattggcaccttgtgctagctttggcctcagaagggtgggaaagaagagaccaaaacgctgtgctttttggcagctgtgacccagcaagattagtgtctgtgtgctcacccttgccttctgactacacagggagagaagctgggatccattaatggccaaagaagagccccagagggagagcactggtgggggaccccactcccccacccctgagctttgtgtgtctcttgccagtctgctcaggaggtgcctgtcagcctgaggttcccccattcccacacagtgctgggttgaatcacccgacatggggccctgcacttggaccaccaccgcaagttctgagatgcgtctgagccctatcgccccccgtgctttgagaagtgaatggaaatgccactttgggttcccctcctctccctgcagtgaactgtgttttcttttattatcaggtttgcctaagagtgagaagtatttttatagggctttcatgcatcaacaataatgatgacaatgaaatgagctttattattgctatctcttatgtgttgtcctaatgcagcaggtgttagggtttgcagaaatgctagggttataaaatacactaatagataactacaagcaacaaaccacatagctactgtatcatgtacaaacaccctgtcctgtgctgtgtagtggggtgtggaaggcagggtggagagcctgtttttggatgagagaatgagcttgacacagcgcattgggaaagtgcttctacggagtcagttctcccctcagattttccggctgaatgggtctgagtgggacctgggtgtgggtgtgtcttaaaagctataccagagccagagttgcaggcactgacctaggaagagagatctgaactgtgtggccttaggtcagtcacttaacctctctgttggtatctcttttggcacgtggagtagtaatgcttgcttagtcattgtaattgcctttattgagtgaccaccaggtaccagagctttgcgtgcaatgtttctaatctccacaactgtaaattatgctttctatttatttgtttacttgatggtagagaatgtatccctcttgttcatggctgtatccccagtgctttggcaataactggcacacgtaaggctctccataaatatctgctgagtgaaccctgggtgaatgaatggatcctgtgaagtgttatccctttatttcagataagaaagtaaagtctcagagaagtaaagtgacttggtgaggcagtggcagggctgtagttggaacttaggactgtatgaaaccacagcttgggttctttgctctgttccctgggatgtgtagggtcgctgtgagtatccaatgaagtatatgtgaaaatattttaaagattaaacactctgtagcagtattaacagatttaaaataaaaacaaacaaaatttggttctgttgcaaaataaattcagtaagtaccaagttagccaaaggtaaatacattatttttttaccttttttttgagacagagtctctctctgtcgcccaggctggagtgcagtggcgcgatctcggctcactgcaagctccacctcccgggttcacgccgttctcccgtctcagcctcccgagtagctgggactacacgcgctcagcaccatgcccagctaatttttttgtatttttagtagagacggggtttcaccgtgttagtcaggatggtctcgatctcctgacctcgtgatctgcccgcctcggcctcccaaaatgctgggattacaggcgtgagccactgcgcccggccaggtaaatacattattataagacttctccaagcctctaacacaacagcaacagacactacttatgacttcacaccatgtgcagatgctgtcctaagtgccttgcgtataaatgcgtttaaacatgattatagcacgatgagatgttattatcccattcaatagatgagcacacacaagctcagagaaggtaaataattcaccctgtgagatgtagccctgaagcgaagtcatggccatgcagaagtgggtgaggcatctcccggtctgtgttcttagccattctgctacagctgcctccttgtgtggtaaggtgctccgtgagtccctggactagccagacagcacatcacctttcccactcataccatcacagacatcttgaagaatggtgttcccgggctcacacctttgggaaatgctgctctgtgttgccccaagaaccgatgcattaggagaaaggacagagctggaaacgggatgagacacgttgcaaggctggtgtaggaaaggagcaaagaccacaggactgtcttcatcaggaacatggcatttcaaaatagatggcagcttctggatgggtctgtgcttcatctcatggtcataaacccgcagagagcctggggcaattgtttgactcagggtttactcactaaatatttcagagagaggagaaagcattgtctgctctgcgtttgccagcggatgggaaaagagagatgatgatttgaagtctaaatatggtgacacctcttgctccagttttatccatctttattcattttttgggggagaatcttccaaataaattcactgtttatgtaatagaacccctttcatgtaccaaacttcttgtaatttaagtatatttgaaggaagtctttccagaatataaaatacaaatccctggatccttaaaagaaaaatctgaacatatttcatcctttttctgggactatacaattcttaggaatttcaatgattgcacctgttgtaatgctggggagctgtcaggagagctaagcaacccgcacagggtcccggaacgtcctgacctggggaagatttgggatgtgcctttcatgcaccaccctgttggggtgtcagcctcctccagcaccagcctgattaatttgctcccccctctctcctgcaggcttgggaaccagttgatcaagtccattacagttatgtgcaaagttagagtaaatagatcctgattgaggacctatggggcttacttatgaataaagtgcattagctttaatttatgggttttataacattgattttggcttcttagaagccatttttcccctttattctctttgttctctctagtttctgtatgattgaagttgttggattggcgccttctaactaataataatagcagcaataacttcagcccttacgctgctggcattgctctatggtccgtgtgttaactcatttagtcccctcgactaccccatgagacctttcttttttttttttttttttttaatgccaaacattacattttattacctttgagcttattaaccagctttgcgtttattagcaaatacatttaaatatctcttttttttttcttttctttttttattatactttaggttttagggtacatgtgcacattgtgcaggttagttacatatgtatacatgtgccatgctggtgcgctgcacccactaactcatcatctagcattaggtatatctcccaatgctatccctcccccctccccccaccccaccacagtccccagagtgtgatattccctttcctgtgtccatgtgatctcattgttcaattcccacctatgagtgagaatatgcggtgtttggttttttgttcttgtgatagtttactgagaatgatgatttccaatttcatccatgtccctacaaaggacatgaactcatcattttttatggctgcatagtattccatggtgtatatgtgccacattttcttaatccagtctatcattgttggacatttgggttggttccaagtctttgctattgtgaataatgccgcaataaacatacgtgtgcatgtgtctttatagcagcatgatttatagtcatttgggtatatacccagtaatgggatggctgggtcaaatggtatttctagttctagatccctgaggaatcgccacactgacttccacaatggttgaactagtttacagtcccaccaacaatgtaaaagtgttcgtatttctccacatcctctccagcacctgttgtttcctgactttttaatgattgccattctaactggtgtgagatggtatctcattgtggttttgatttgcatttctctgatggccagtgatgatgagcattttttcatgtgttttttggctgcataaatgtcttcttttgagaagtgtctgttcatgtccttcgcccactttttgatggggttgtttgtttttttcttgtaaatttggttgagttcattgtagattctggatattagccctttgtcagatgagtaggttgcgaaaattttctcccatgttgtaggttgcctgttcactctgatggtagtttcttttgctgtgcagaagctctttagtttaattagatcccatttgtcaattttgtcttttgttgccattgcttttggtgttttggacatgaagtccttgcccatgcctatgtcctgaatggtaatgcctaggttttcttctagggtttttatggttttaggtctaacgtttaaatctttaatccatcttgaattgatttttgtataaggtgtaaggaagggatccagtttcagctttctacatatggctagccagttttcccagcaccatttattaaatagggaatcctttccccatttcttgtttttctcaggtttgtcaaagatcagacagttgtaggtatgcggtgttatttctgagggctctgttctgttccattgatctatatctctgttttggtaccaataccatgctgttttggttactgtagccttgtagtaaagtttgaagtcaggtagtgtgatgcctccagctttgttcttttggcttaggattgacttggcaatgcgggctcttttttggttccatatgaagtttaaagtagttttttccaattctgtgaagaaagtcattggtagcttgatggggatggcattgaatctgtaaattaccttgggcagtatggccattttcacaatattgattcttcctacccatgagcatggaatgttcttccatttgtttgtatcctcttttatttccttgagcagtggtttgtagttctccttgaagaggtccttcacaacccttgtaagttggattcctaggtattttattctctttgagcaattgtgaatgggagttcacttatgatttggctctctgtttgtctgttgttggtgtataagaatgcttgtgatttttgtacattgattttgtatcctgagactttgctgaaattgcttatcagcttaaggagattttgggctgagacaatggggttttgtagatatacaatcatgtcatctgcaaacagggacaatttgacttcctcttttcctaattgaataccctttatttccttctcctgcctaattgccctggccagaacttccaacactatgttgaataggagtggtgagagagggcatccctgtcttgtgccagttttcaaagggaatgcttccagtttttgcccattcagtatgatattggctgtgggtttttcatagatagctcttattattttgaaatacgtcccatcaatacctaatttattgagagtttttagcatgaagggttgttgaattttgtcaaaggctttttctgcatctattgagataatcatgtggtttttgtctttggttctgtttatgtgctggattacatttattgatttgcgtatattgaaccagccttgcatcccagggatgaagcccacttgatcatggtggataagctttttgatgtgctgctggattcggtttgccagtattttattgaggatttttgcatcagtgttcatcaaggatattggtctaaaattctctttttttgttgtgtctctgcccggctttggtatcagaatgatgctggcctcataaaatgagttagggaggattccctctttttctattgattggaatagtttcagaaggaatggtaccagttcctccttgtacctctggtagaattcggctgtgaatccatctggtcctggactctttttggttggtaagctattgattattgccacaatttcagctcctgttattggtctattaagagattcaacttcttcctggtttagtcttgggagagtgtatgtgtcgaggaatttatccatttcttctagattttctagtttatttgcgtagaggtgtttgtagtattctctgatggtagtttgtatttctgtgggatcggtggtgatatcccctttatcattttttattgtgtctatttgattcttctctctttttttctttattagtcttgctagtggtctatcaattttgttgatcctttcaaaaaaccagctcctggattcattgattttttgaagggttttttgtgtctctatttccttcagttctgctctgattttagttatttcttgccttctgctagcttttgaatgtgtttgctcttgcttttctagttcttttaattgtgatgttagggtgtcaattttggatctttcctgctttctcttgtgggcatttagtgctataaatttccctctacacactgctttgaatgcatcccagagattctggtatgttgtgtctttgttctcgttggtttcaaagaacatctttatttctgacttcatttcgttatgtacccagtagtcattcaggagcaggttgttcagtttccatgtagttgagtggctttgagtgagattcttaatcctgagttctagtttgattgcactgtggtctgagagatagtttgttataatttctgttcttttacatttgctgaggagagctttacttccaactatgtggtcaattttggaataggtgtggtgtggtgctgaaaaaaatgtatattctgttgatttggggtggagagttctgtagatgtctattaggtccgcttggtgcagagctgagttcaattcctgggtatccttgttgactttctgtctcgttgatctgtctaatgttgacagtggggtgttaaagtctcccattattattgtgtgggagtctaagtcaatttgtaggtcactcaggacttgctttatgaatctgggtgctcctgtattgggtgcatatatatttaggatagttagctcttcttgttgaattgatccctttaccattatgtaatggccttctttgtctcttttgatctttgttggtttaaagtctgttttatcagagactaggattgcaacccctgcctttttttgttttccattggcttggtagatcttcctccatccttttattttgagcctatgtgtgtctctgcacgtgagatgggtttcctgaatacagcacactgatgggtcttgactctttatccaatttgccagtctgtgtcttttaattggagcatttagtccatttacatttaaagttaatattgttatgtgtgaatttgatcctgtcattatgatgttagctggttattttgctcattagttgatgcagtttcttcctagtctcgatggtctttacattttggcatgattttgcagcggctggtactggttgttcctttccatgtttagcgcttccttcaggagctcttttagggcaggtctggtggtgacaaaatctctcagcatttgcttgtctgtaaagtattttatttctccttcacttatgaagcttagcttggctggatatgaaattctgggttggaaattcttttctttaagaatgttgaatattggcccccactctcttctggcttgtagggtttctgccgagagatccgctgttagtctgatgggcttccctttgagggtaacccgacctttctctctggctgcccttaacattttttccttcatttcaactttggtgaatctgacaattatgtgtcttggagttgctcttctcgaggagtatctttgtggcgttctctgtatttcctgaatctgaacgttggcctgccttgctagattggggaagttctcctggataatatcctgcagagtgttttccaacttggttccattctccccatcactttcaggtacaccaatcagacgtagatttggtcttttcacatagtcccatatttcttggaggctttgctcatttctttttattcttttttctctaaacttcccttctcacttcatttcattcatttcatcttccattgctgacaccctttcttccagttgatcgcatcagctcctgaggcttctgcattcttcatgtagttcttgagccttggttttcagctccatcagctcctttaagcacttctctgtattggttattctagttatacattcttctaaatttttttcaaagttttcaacttctttgcctttggtttgagtgtcctcccgtagctcagagtaatttgattgtctgaagccttcttctctcagctcgtcaaagtcattctccatccagctttgttctgttgctggtgaggagctgcgttcctttggaggaggagaggcgctctgatttttagagcttccagtttttctgttctgttttttccccatctttgtggttttatctacttttggtctttgatgatggtgatgtacagatgggtttttggtgtggatgtcctttctgtttgttagttttccttctaacagacaggaccctcagctgcaggtctgttggagtaccctgctgtgagaggtgtcagtctgcccctgctggggggtgcctcccagttaggctgctcaggggtcaggggtcagggacccacttgaagaggcagtctgcccgttctcagatctccagccgcgtgctgggagaaccactgctctcttcaaagctgtcagacagggacatttaagtctgcagaagttactgctgtctttttgtttgtctgtgccctgcccccagaggtggagcctacagaggcaggcaggcctccttgagctgtggtaggctccacccagttcgagcttcccggctgctttgtttacctaatcaagcccgggcaatggcgggcgcccctcccccagcctcgctgccgccttgcagtttgatctcagactgctgtgctagcaatcagcgagactccgtgggcgtaggaccctccgagccaggtgtgggatatagtctcgtggtgcgccgttttttaagccggtctgaaaagcgcaatattcgggtgggagtgacccaattttccaggtgcgtccgtcacccctttctttgactcggaaagggaactccctgaccgcttgcgcttcccaggtgaggcaatgcctcgccctgctttggctcgcgcacccactggcctgcgcccactgtctggcactccctagtgagatgaacccggtacctcagatggaaatgcagaaatcacccgtcttctgcgtcggtcacgctgagagctgtagaccggagctgttcctattcggccatcttggctcctcctcgagacctttcttgtaatcaccccattttaaagatgaggaaggggcacagggcaatgaactaacttgcccaagtttgcatagctatgaagcagtggagctgggattccagcctgggtgtgtggctcccaagtctgtgcttttaactgctatgctgtgtggcccccaactaaggtataaatgggaggggtattttgctttgaatacgatgccttaattatcaggccttcaactagagtttatgcagtgtgtgcgcttctgtctttaccaagaggaccaagggaggagcaacagtgaaggagggagtgaacgtccccaggctgggtggtgtctgtaggggtcctgggggcatgccatggagcccccaggccatgccatttggaaagcataaggggtaggcaaaggggaggccttttcatctgctactacctgagaggtagacttggctttgaggccatattttcccagggatcagtgattcatattacctgagatcctcaaccaaacaggcccccgggcctcttcctaaatagatgagaatctctggttggggtgagggaacccagaatcagcctgactttctgagacaaacttaaaacttgagggacccttctcgtggactgagtccttggaagcagatcttgggagctgctgggcctgcatttgaacttggggccttcatgggaccccagtcagtactggtggttggcagggctcagagcataacatgtgggggaccccacggcgccccgcccaggtgagagcagtccccctctcgtgccgagaggctccacaggttttgcctgtgcaccctaggccccactggagacgtggaaacatcgaagagctacggcctgaacaccaggatgtgggatgggtagtaagagagtgctgagctgcatgtcctagccctgggctctggttccagttctacctctgcctggtggcacggccttgtcacttcacttctctgagttttaggtttctcggctgtgaaataaagataataattcctacctcactgagttatggcaagggcaaatgagaatatagatagaaatgctccgcccagctctaccaaaaaaaaaagtatatatatacacacacatacacacacattagctgggcatggtggcttgcacctgtagttttagctgcttgggaggctgagacgggaggagtgcttcaacccaggagttcaaggcagcagtgagctatgattacaccagggtgatggggcgagaccccatgtttattttttaaaatgctctggaaaaatgcaaagtgccatataaacatagaggcattattgtgatcattattactgttatgattcaaactagacagatatatttgtctctaaaatacttactgtttttttttttctggcacattcctctgtgaacctttttcctcagcctcctctcaagataacttagagatgcaaaagaactagaagccaagttccaaatttagttcttgacctttccaagatgggtggtgagtggtgtggctgcaacctgcctgctgccaagagtctggcagggctgccggggtccgggagcgccaggccagtggaccctgtctttgtgtgcagtcctggagccgacacatcgcctcacacaggcgcccctgccgggagctcatgcgggccactccctgttttctcactgggtctagctgaactctggcacagcgagtgtagctgctgagtagttcgtttggtgctgtcctgtgacttgcaaaccccttcctcaaatgcatagcagaaatagtgggaaaaccccagggcttttattatctgggctctcgggcacacagtcagaaacatggcctggggcagcctctcttctctgtgcctttgagtcctgaggaacaaggtcaggcatcaagaataaggaaggccaggatatccaggaggagacctcacgtctgcaccgaggcttcatcagatctgactggaagtgctgtggtccctgtggccaggccagccttcacagggctggggagcacaagccttggtgtggcctgtgcttgcagatggatcctggttgtgtgggggaaggcaggtggcaggtggtggatgctatgcttgagggctgggctgtgtacgcagctcacagtgtggaggtgcttgaaccctggcagttgggcacggttgatagggacgggccttgtgggagaaggtgtcgaaggccagggtgtggctccgagtcccacttctgctagactgaccagagagagcaggtaagagagtgaccagcagcaggccggggtcacttccacgcttcctgcccatcggaggaatgttccagaggttatcccagagagaggtgaagcccaacatggtctttcagccacacgccgggctccccttccccttctgccatgagtggaagcagcctgaggccctcaccagaagcagatgctagagccatgcctcttgtgcggcctgcagaaccgtgagccaaatacgcctcttttctttttaagtaaccctgcctcaggtattcctttatagcaacacaaatggacttagacaatccccaaggcccagacttggagtcccttcttgtaggaagttttctctgctcctccatgactggctttggtgctgccctctgtgtttccatagcattctagatgacccctatcaaagcacatttagcctcctgcttactcatctgcgtctctcagtgtgtttgttttctagcactgctgtgaaaataccatgcatttggtggcttaaaacaatagaaatttattgtctcacagttccagaggccagagtttcaaagtccaggtgttagtagcattggttcctctgggcactctgaggagtgtgttccgtgctcctgccctggctccagtgttgccagcagcgcctggcatcccttggcttctaggtgcctcactccagatctctgcctccgtcttcacatggcgcgctcccctgggtgtttgtgtctctgtgtccagctttccctcctctgataaggacagcagtcattggattagggctccttcaccttaatccagtataacctcattttcacatgattccatctgcaaagactttatttccaaataaagtccatctgcagctctcaccagcagcgagccctgtgcaagaagggatcacatctacacagatccagtgcagtacctggagtacagctggggccttgcgcatgtctgtgagggccaggccaggctgttagagtgtttcttgaaggaaggtgtgcttcagtgtggatgctggtcctgactgggccgctgcccttgcctgttagctccagacagggtgggcttctgtacccgtttacagtatagccgcctgagggaccgtggcatgtgtggcagaggagatctcttgcgcccctgaggtcctccagttatatcttagtcctgcagcttagcaccaatgcctcctcattctctgcctcctctgcccgctggcctcagacatgcgccctaaagatgggagcatgcagtgtgaactggaggtgtaaggggtgaggccgctcccaggacacagcgggcctcatgcgacatgccctggcttctggatccctaagcaccgaggccatccagggaagggctggcctcctccctggctctcagggtgctgtgaatcaggtttggcaggggtctcagcaggggcttatctctgccacagttcagtccaaacaggatgagcagctcttggtggaccagcggtgacccaggcagctcctggtgctgtgtactaggctaggagctttggagggcgtccctccctgcagacccctctctcactgcccatacggctgtgtgttgtcatcatattttggcagagaacctgtcccataaccagagaacctctgtcctgggacagggacaggccccagctcactctgggaacagtcacggtgggtggacgatttgcagaatggtcggagaccctccagcaagaggatccattgttcacgactgcagggtgatttctttgggattgcagacaagggcctcccagtcacttttggtttggtgtctgttcttaacacagttcctgaaacatagaaggcactcgatgagtatttgctgaataaataactgaatgaatatgtgaagaagagaagctgttcatggactagggattctggcaaggtgtggcatggctgagacagcaccagatgagaggctaggaggcctccatcccagacctctctctgctcctcaccagctgagtgaccttgggcaaatgtctttgcttctcttgacctctgtttgttcatttttcttaatctaggagaggagtatatgtagaggattcttttatgttctgtgcatctgtggtcttttgcctgacaagtagaccatttgacttcatatgagcacattccttcatgcattccttctgtcatatttattaaatgcctactgtgtaccaggctaggtgctggaaaagcaagatgtgcggaaacaagggtgcgcagggtctctgccctcacagagcttgtcaggtttgataagagcttacgttcttatgatgccagccaataaacaactggcaacttcatacacaccatgctttcagagcactgtgaatattaataccatggagaaagtaaaggagataatgagatggagagttccagggtaagggcccacctggagcgggtaggcagggagggtctctctgaggaggtggcactggggctgagaggtggtgacaagatgggctggctctgggcagacctggggaggaggctgcgggcaggggacagcagggccaggaccccgaggtgagcagggcccactgtggctgctgctcaggaggggagatgaaggaggatgtgagtggggttggaggggcagacaggggctgaattatgtgggtcagcatgaggagtttgttgtgagtgtgacgttggcaggtctgtgtgcttcccaaggctccagaggagcaggaaggatctggaggagggttaggaaggtagcagagataggcgagggttacggccttgactttagcattcccagagcagttgatgtggttgccagagggcctggccagagctcactggggaagaaagccctggacggtgcaagctgccatttcttgaagggaagtcggtcatggaaacatgtcaaagggacctgccagaagcttctgggacacaaggctcttgtgaggtgttttcccgtctcttttgtgtacactgtgggcttggccatccagccttcatttccctagcaacttctctacatccagatccataagagaaacctttctggtcaccccataagggatgcaagctccgtaacgagcactcaggctcctcgctgatgggggctgcgaggttccagaaggttggcccatgcagcaggccactccttagcgcctctggccctgggtagactttggcctcaggggaaaggagcgtggagacagctgtggacacccagattgctgtatatctgacagcgcttggcccccatctatctggaagtggggtgaggcagactgcattttcaagctcaaccctttcctttatggcagctggggtgggtgaccagccctgtgtaagccataataacccagcctgcatgaggataccataaagcggaagccgggcggctctttgaagggatgacgtgggaagggtatcctctcctttccagcattccttcatttggggagcactgcctccttgggacaagactctgtattggggaggcagcactgaatggggaagtccctggtctggtgggggacagccaccacctggcacgtgatggtggcaagaatgcctaatgcttatgagtgccgcagtgtgcagctctgtgccttacacacgtcacctcccaccatctcccaaggaccgtgtggggtggatcatacagtcaggcactgcataacaagagtctgatcaaggacagagcacatgtacgatggtagtcccataaaactatcacggagccgaaacctccctatctttctgccgtcgtaatggtgcagtggcactcattacttacgtgtgtgtggtggtgtggtgctgttgtaaacaaacctactgggctgacagtcttatcaaagtctagcacagacagttctgtacagtactgtacagtacacaatacttgataataaatgactgttactgatttacgtatttactgtgctatacttttaactgttattttagagtatactcctacttattaaaacaaacgttaactgtaaaacagcctcaggcacgtccttcaggaggtagccataagaaggcattgtcatcttaggacatgcagctgtgtattattttccccgaagaccttccagtggcacaagatgtggaagacagtgatatggatgatcctgaccaaggatcctgatccttgatatcgacgatcctggcctaggctaatgtggacatttgtgtgttagtttttaacaaaaaccttgaaagttaagaaaatgttacaaatagaaaaaagcttatagaatatggataaaagaaaagtatttttgtacagctatacagtgtgtttgtgttttaagctaagtgttattacaaaagagtcaaaaagttaaaaaaaattaaaaggtttgtaaagtagaaaagttacagtaagctgaggttaatttttaattgaataaagaaaatctttaaatttttttttttgttttttgagacggagtctctctctgttgcccaggctggagtgcaatggtgctatcttggctcactgctacctccgcctcccaggttcaagcaattcttctgcctcagcctctcgagtagctgagattacaggtgcctgccaccatgcccggctaagttttgtatttttagtagagacggggtttcaccatgttggccaggctggtctcgaactcaggtgatccacccgctttggcctcccaaagtgctgggattccaggtgtgagccaccgcacctggcctagaaaatctttaaaataaatgtagtgtagcctaagtgcacaatgtttgtaaagtcgacagtagtgtcctgtaatgtcctaggccctcaaattcactcaccactcactcactgactcacacagagcaactttcagtcctgcaagctccgttcatggtaagtgccctatacaggtgcaccattttttgtcttttatagattattttttatgtaccttatctatgtttagacatgtttagatacacaaatacttaccattgtgcgacagttgctacagtgttcagtacagtctcaggcacggtcagaggcctgggagcactaggctgtatgtagcatacagtctgcgtgtgtcgtaggctgtgccatccaggtttgtgtaagtgcactttctgatgttcacacaacaacaaaatcacctaacgacttatttctcagaatgtatccctgtcatcaggagatacaagactataattaggggtaaactttaaaggactttgttgagaagaccattcatgtggggcttcctggatttggttgggttgtggtacctcctctagtgatgcagagccttcctatgatttttctccctgccccaccccaatgcccaccctttcgatttgctatttcctctctccacctcaccccaacacccagtgctatttacatgctatctatatgatgtaagttgtgtctttacttttcagctgcctgactgtgaatttataatcactggtattggtaacagtaggctagttagttggtccagtcaaacaaagatgaactgatccctgctctgttgcttgtggtcagcaccacgtgggcacacaggaggactaatcattcctgtgtaaacgctgagaaaacaactaagacacatggaaaaattaggagctatctgcaggattctgactgtaatgtgattattagaaagccaataaggcagtggttagcatgaattggagtggtagaaaaggatttcttggaagaagccgggcttgagtgccatcttgaagggtgtagaagaattgtctggaccaatggtaggagtgctgggattccaggtaaggaaaagaagagacaccattccatgtgaaagatatcattttgacatataaacacagaatttccaaagttcagtctaagatcattcttagggtggtctgttttcattcattcaacaattacctatcgagcacctatcatgtatgagacacagcagtgcttaaaacacacacagttcctgccttcatagggcatccttctatctaagggagacaggtattcagtatctatttacataattatttattcatttataactcacctctaaaatgtttaggtttggggtgtgactatatttgttttaagttaatattttacgcgtgctactgaaaaaacaaaacccaaactaatgatcactgtatttcatggaagcgggggctgtctcatgaagatgacatttgtcttaaattatgattgaaaaaaatgttttagggtagattgtttgtagagtttttcatcctgctaaagtgatccctaaatcataaaacttgagacttgctgaatgaaagggataaaagagtgaggaggacctacaaatcttcatggggagtagattgtgtctgtttgaagtaaagccacacctgtcatgagggaccaggagaggcttctaggaggaaagagaacataccagggaaagaactgagcaaactttcaaccctctgcagtattagaggtggacaggagggcagcactatattggagagattgttaaactgaaaactcaattagcatgcacaaaaagtatatgtgtttaaggctgttttaactgttggtgagatgctgagctgctaagggctgcctgctgtcattacctattagcaagactttaaattctgacttgctgaagtacgtatttccccctgtagctagccatttctagtaaagcttgtttatttttatttttgtaaaaaaaatggttatagttaatttatccttttggaattggaagagcttcctgcctgaataacttttttttcttttcattttctccagtgtagaattgctggttttggccttttggagctaagtaataaaactctttgtttattctgctgggtctttgcttgtgttagagctgttttatctcaaacatttgtaattctataaattgaaatcagcttttcttacacttgtggattcctttagatttgaaatctattcttggttacgtttatagcttcaacacgcctctcattgtaggtttatacatgtgtttgcttgctcatttattttgtcatcatttgctcattttattaccagttattgagtgcctactgtgtaccaggcactgggcaaggggcattctgtgagagagggtatggtacctgcgggcttaagtagtccgtgggcttgtgaggaaaacgctagattaaatcttgattactgtaaatgtcaagtatggccaagtgtgggatttcgtggcaggagtgagctttcctggaatttgtctttcttgcctcaatttgcctgatagtcatttcatgctagggatgttttaaagtctctggggaggccctgcagtgtagaggaaaatgctgatccacaccagaaatgcgaacctggctctctgcccttgggcaagtcacttaaccctcctgagcctcagtttccatctgtcacttagagctgattatacctacttaacacccaggctttttgtgaggggcattatctcattagagataatgtttttaaaagctctttgtaaattgtgtagcattcaaatggaagttattgttatttttattattgagtgccttctaattcaacactgggatagtaacaaaagaagagaggggttattatcacccctcttccctgtcacgtttagattggggcaaggaaaggttctcaccctcgaggaatttatgatcagactggggagacaagaaccagtttgagaagcaggtaatggtagttgagagaagggatagagggctcaagaatctctccgcgcctttctggctccaaaattctacagtaggagtcaggaaaggcttcacttgtgaagtggcacttgagtgaggccgtcatcagcataggaatcagaatcatctttgtgtgctcatcatagtaaaataaatattgattgagtagcagtatgtggcaagggactcacaaatacattttggttgaggagtcaggttacttggataaaaaatgataatgaatggtacaaaattccctccactggcgccacaggaggggcagccccgggcctgaggtctttgggaaaggtgtggggaggcggtgggcacaggcctagggaagggcaggatttagacgaaagcagagccattggaaaggcatattctgtgtttccactattgacagcctcaattattggttttcccattcagctttctgctctcagtaccccattctgtttacctgctggtgggcagagcgtcacacaaccaaactcgcgtagccttcttcaccctttcccctcttttctgcagaatgggtttgttatgacttgactgtgatttttcaggcctttaatcatccaaggtgaatgtctaagggtggacccaagcagggctggacccaagcagggctgagttaactggacccaagcagggctgagttaggggaagcagggaagagaggggaaggacagcctgagcccttccagacacaggcaaaggagagaggacagacatatcctccctgagagctctccaacccccccaattatcaaagcaaatcaatgtcactctaagtcatatctccatactagctctatcctttctcctgtccctatctctaggtctataaattcagggcttaagggatttctagggaaattacagcaaacgaatcactgagagagggggggaacctccaaaatgttgtgagttgcttgtttaatgtttcaggagcttcaaagaaattgagcaatttagattaaatttcaagaagtggggctgactagagagagaggaaagttagaaacagcgtgctatagaggttgatggtgggaataaactctgctgtttcagccaggccaggcttccttccagtgtgcttctgtatgatgttaataaatgggaaagtgattgacaacttccttaggcaactttggggagtgaaatgccaaatttgggcaaagcagacctctagctttattggtattggggctttgccagaattatctgctattaaatacttccagggacctgttgcctctttgtgacaaatgttagataatttccattaactgcattattgatggagaaagcagaaaggtgagagagtggagagagtaaagattgaatgagtgtcagaactaactggaggaagagggaagataaagatgtgaagaagtatatatctgaggataaaatgtaaaatgaaattaatgaaaatacgatggtcagattggaaggagagaaaatgcaaattacagagtgaaagaagacttctttctactctcaaatgttttggggggattttgggggggcaaataggcagtaggttttcacaccttttgaaaaacccacctcttcacacttgagttttcatgttcttggttcataatcctaggattaccattgtcagttgtgcagaatcccattggaaagcaatatgccatcagtacatctggtaacaggaggatgctaggaatgggaatacagaatatttatgcaacttctaggcttctaaaaattgtatgtttacatgcatatatacacatacatgcacacttatataaaacctgtcaaatttttcaaaaatttttgaaaggattagcattataaagtcataaggaatctctgaagggactttagagtagagaaagatgtgagaaaaagcctaaatatatcactctgcagcaaaccaatcatccacacaaccacagaaatctctgataaatctcttatgaactaaactccctgttgcccgatggttctttttggaaactttgtctctgtctttcgtattgaaatatcgcactgaaaagacctgccatggagatgttgatcccacttatgggcaagagggcgtctgaacttgtcttccagccatggctcaaagattgcagatggaaatccctgctgctcacatttgtatatttgatcaaactcttttcatggccagaccaggctccaggggttctgggtcacatcttccctctagctgccatttactttgatcatactagtaatgattaccatctacagcatgtattatgtgccaggaactttgaatttgtcatctttttggttttcttgggacagggtctcactctgtctcccaggctggagggcagtggcatgatctcggctcactgcaacctctgcctcctgggctcaagcgatcttcccacctcagcctcctgagtatctgggactacaaggcatgtgacactacacccggcgagtttttgtaattttttgtagaaacagggtcttgctgtcctaagctggtctcaaactcccgggctcaagctgtcctcctgcctcgacctccaaagtaccctccctccctgcggtctggaggagttgccttgggacctgtgcttccttggctctatgcactaccagacgcagtccagtgggcagcctggcgggtggccctgggactcattgctttgcagcctgtctggaccatccctaacagtttatttttttgacttttccagtggagagtccacagagaatatgacttttccttgggtcatctgtaaagacttggcaagggatgtcttgcatctgggaagatgtggtcttgggggtcacctaagcagcagaggaaaccttgcaagatgacatttggggctaatgtggaattaactaatagactgatgagtttgcttgatctgagaactcacaaaggatgttgaggaagaaagggcagctatgacctatcttggggttttgcattttgttcttgtgaccctgtggaaatgctcagatgagtgcacatgttcagactcatgccaggccagtgtgaagaatcaagctgagtatgcatccttccgaggctcaaagccaagagaaagaaagagaggcctggtgaaatatcataggaaatgtcacggtcttttctggactctcttaaaaagcccaagacccatttaatatttcgattgcaagacatatctctactggatggtgttttggaaagctggagtttaggaaaatcctggctgtaggaatgctctactgctgtgaacattcccgctttaggaatgctcatagcagtagagagtgggctactgacttttctggttttcaacagtatcttatttttcctgaacatttattaactgtctgccctatcagagaacttctcagattgggacttcccttgagtaagagacaatgacctgaaatgcagggcgagagaaatttctttcagttttaggcggaaggtgggacccaaatttaagagagccaaccccaagtaaggaagatcagctctcactgggagctgtgtaggacccaggggggagcacaccccaggaaagggctgccggtggatccggaggcctgacctggggcccaggctgaagtagaacatcagcacctctagtagcccagcaatttggatagcaggcagagtttaaaggaccaaactggaattatgagtcaagactgggcaggaagcaggaagcaaggatgaggagccaggttatgataactagtgatgcatggggtgtccaggcccagaggcactaaaagggggtcaaggacccagcatggagactgggtaacagagagccatgctgtgctcatggaatctgggcagcaagagtagcagctcccagaggggctggctggcaaccttttgtatcagcttaggaacttttcatgttggtcaggagcagagacgcagttccagttttggctggcctggagcttgcaggataagcccgtgtctggctgcactgtaaaaataacacggagaataggatgggtcttgtccttggtctctagagcagccactacatggaagaaagaggtagaaggcaggtgtctatcaagtgacatcacagaactcaagaggagtgaatgtcacctccattccccagtctcccaacattccctggggaacagggcagagggaagacagagtaggggaattccaggataagcttcatgcacccagaatgtggaatgctcaccaaagaagaacaagagccgtgttcacatcatgatattccgccctcttaattcccaaacagggctcccaggctacagagcagctttgataacagcagtgcactccctctcctctagaaagttaggtggctttaaaataggtaaggctaatttcattccttctgtgagttctgatgaaaggggcatttggcgaaaaacacgtgtgggttggcatgcaatgaatacttatttacatgggtgttttgaagacaatgacacagaatcaaaatttaacccacaagtttaggttttcagtttccttctgcttctctcctttgagaggtagagatggagaaactgtctctaccgctcttattttctcactctgataacaatcttttccattagtagagtgctatataaggtacagtgcacttgggaaatgcctcttgggaaggtgacatgtaaaaatggtggtcaacgccacttctgggcaggtgccaaggcctgtagcagcctgtgtctttgggtcctgcatgctttcctttgtgttggctggttcctctggctgagttcactgttggtctgtctgtggcaattacggagaagcatgacagtcacagcttccctgagttctactgaactcatgaactttgttcataacagactctacaagtggtacaggattcctatggccacaactcaactcaactccgtagaaatcaatgtttatggatcattggagctaaaagaaaacttgcagatcagatcatctcatccaattccctgactttacagaatgaggaaactgaggcacagtaagatttttttttttattttttgcccaggtctgaataaaattgaaggcacccttaccatagccaggattctttgtatataccactggctgaccagtggtagctgaaaaaaaaaaaaaaagggatttgagatggtaggaggggtgtctgactgaggagccatttttataggtttttatagacatttgcattggtttggagtagcagaaccagaaatagtctttcccttttcaggagcaactctgcacagaagactcactggctttggactctgtccctatcacatacatttcagtagccaggccaaggcatctggctgggaggctgggtacgtctcagagaataagcgcttgtcatagaatgggtcgtgaagctgggcagagagccaggtttgcagaaatggctttgtattgatgaagaagggagatttttaccttgtcttggcctccatcatgaagagagtgttacaaaaaagtacagatgacagcaggccactctcggagacacacacgaagcttgtcttcctccatcccaaatacataggtcagtggaccctcaggaatccattctgatgcacgggtggatgagccaagggctgggcagaggccatttcaatagcttaatgcttgccaggtatatctgagctagtgctgccccagggacagagtatcctctgggagatctgaaccaagcgagggtgtggcagccggtggatgacttacagtcagcctatctgggcagattttaaaccctggcgtttttagtgccttgactagtgtgagaaacttgaaactcagtctcattgctatttgtggtaatggtcatttagtttcaggaaaacatcgatggtgcccttccctagatagctgcgttgcaatggaccacattatggcatgcacattaatgtagggattgttcatacaaaagagggcaaagatgccacttgtgacagaaatgactgttacccagtgtctgttctctacctctttcatagggatagaattttcagctgggcacatgactgcttagaatgaagaactacagttctcatcctcccttgtggctaagtgaggttttgtgactaagttctagatagtaggatgtcagcagaggtgatgcgtgtgacttccggtgtgtgcccttgaaggcaaagtcatgcctgccctttccctttctccctctgcaggcgtgttgccgtcatggtgaggagccatttcatatcatgcagactaaaagaccctttccaggtgctggagcaaccattcagaaggcggtgatggctgggggagggcttccatgggagagaggaagtaaatgtctctcatggggaatccctgttgttttggtctctgtcaaccatggttcaattcataacttaagttataccctacttattgggaactttgattttggaaggcaaagaaatttaaaaattaagaaataaaaataaaacaacagatagcacttggataagttggccaagttcaagtaacacaaaaaagtcaggacatggaaccaggaggtggaagtgccttgtttctcctcctcctctttccgtttcccatgtcacccacaggactggtgtgcccggtaggaaagattggtaggtcccactggtcccgagtgtcctacggccctttatattggataatattggaactggattctcctagagattgggaatggtggcagaaaaattaaaattgggaggtgaaagctcaaggaggtagttacaaagcaaaggaaaacaaacagttttgggcatccagctgcctttcagtggtggtcactatggcagagatcagcagagtgaagggctaggagatagactcatttcggatctaactttaataatcaattttaatgacccttgagcgaatggagcagttgattttcctctcaatcctctctctgtgtctgttgttcctgcaaagcctattgggacttgcctgaggaattggcccttatccttgaggttaatgaaagacaacactcaagaagcttcccacttacagaactctttctccaatttagaatggaggctacttttttttttactgtggtaaaatatacataatataacattcacattttaaccattttaaagtggcattgagtacattcatactgttgtgcaaccatcacaaccatccatctccaggactgttttcttcctgcaaaactgaaacgctctacctattaaacaatcagttcccattcccccttcccccagcccctggcacccaccattctactttctgtctatgaatttgaccactctgggaacctcatataagtggaatctcagagtatttgtccttttgtgactggagctagttttggctaagtcatgggagaggcaagtggatcccttgctggtaggaaggacagggccgtgttgacagggaccatgaggcctccgccctgcagttttcctttgtcctctgcgtggggtggggcagccctcttggggaaaaggctctcctcatttcatctttacttttccttcctgggagatggagcaaatggtgcctgccttgtctatttggagcacacaggcatagatcattaataagataattggaaggtacttggcaaaatctgaaatattaactgtctcagagaagctgaataatcacagggtctcaccaagtgccacctcaacaagtgcagctttcacccgtccttggacatttatttccctttgtctgcactctgttccctttctcccaaaatgctgggtagaggttctttaaaattcaagaaaaaaatcagacttccccttctccccagtgacattcccggcctcttctctcactcgagtgatttcctgtatgaaattcaacaacaggtccacccagaggagttctttttcctccagcttctctgtttaaaaatcttgggttcttcctgacaaaaggaggcttagtcatcttcccccagtgacaggccctacttaaaaacaaacaacgaagaaatcctacatcccactccagcttgtgctgcagagcctggccggggagggacaggggatggtacacttggaaaggcaatcaaagagtgggcggtcagaaaacaaaacctgccaggttatcaaaaggacaccacctccaatgcacagagctgcttccttcccgcacacacggaatcttcctgctccctgccccactcatcgtggtcgtggccagctgtgtccagcagcctggcgcccacttaacaaacaggagcaatgagggagactcctcacccggggccagcagtgggtcagggaagaggctggggttagggctcaggggtctcaacctggagtcctgtgtttgcagctacaactccaaggccttgggatttgcctagtggggaatcctgggctccagggaagaagtcactgaaggtttaccaggcagacttataaatggggagaaactgaagcctagaacgcccccctctctgatgactgctgcctacgctgcctccttccttctctcagctccaaaggcacagaatgtctgatcggagagtttagctgctttctactgttttctcacagtttcgtttatcagccttgtcttgccaatgatacagaagctccccgcaggacagtgggtaggtgggagcttcccgatgatcatgttggtgttgacaaagctccccaaagtggggtattccctcaggctggtctccggagccggctctgtgctctgaaagcggcccatcctgccgtcctagagtataggtgccgtctatctctgtgtgttgagttatcgggagatgaaagatttttttcacttggtgaatcctggcattgtgggaagactctcctaacacagacataattctcttgcaatcccacaggcgcacacatacacagaggcgtcacacacacacagaggcacacccctggtgtgtcatgggcgttgttttgcgtggagaacgtggagcgtgaagacacattttctatgacagtggttcccttggtgtgggattgatggacctgtggacaacaggagttttgttagtgctcttcagggtcccggagatcatgtactagaacacctttcctccacagaggaagagactgcaacccagagagctttgtcacttagacacacaattttactttgcttgggcttcagtttccctatatgaaaagaaaaaaaaaatagaattgccccaaaggatcttaaggactttttcagaattccgtacataatgagtttttattgtcattttctcaccattctttggcctttgtggaactgactagaatagctcaattgtttgttaaggaatttctgacctcaatcagttttccttatataaggagttaccagttttagagcctcatgtcacttggggctgtgtctcacttaaaagtgctgtgagagcatattggattgctgaaaggagaaactgaccacctcttagaagacatcaccaattcaaatgagggtgtctcctttcctagcgaaaacgggcacttagactagtttagagccaccggaggtgggaggatgagccagatgtccctggaaagccagtttaggggtgcttttctcatgttttccagggtttaattatgctccgtgcttgagagaaatatttttgaacctgaggattttttatcttaacgttgaacaaattatttatctttctttttctgtcccctccatagttccccaatgactctaatttttattattgttataaagcatttttccttaaagagtaaagacgcaaataaaaaaaatctgcagcttagacacaagaacaagagtgaatctgacagacctaaggttgagtgaaagaaacatggcaaaggggtgtgttcagcaggactccattcctgttaagctaaaaatgggccaaatgaagctatcttttaaggtacacatacatacgtggcaaaagcataaagaaaggtcaagaaatgatgatcgcaaagtcaaggtaatgttgtgtttctggattgatggtagttacatgaaagtatgctttattattcattaaactataaaaatatgtcatatgtaccttttaaataaaaatagaataaagtgacatggaaatcagaaaaaagctagtagcgtaaaaattgcagattcatatggtgggttgaatgctctcttccaaaaccacactaacatgatggtaaaggaatcgttaaaaaatgcataaaccacaaagacaaaatgaatccaaagaagacatcacccaccggtgtttatttgttcatttttttgtatttgaaatactctttgatgacatatttggctttgattctttggcgctggccttaacaaccatacagctgcaaccagttgcttacagggctttgcttttctgctgattttgcagaggccttctccattcctttagtttgaccaacctcagttaagctgatgtgggtgtcaacaaacagttcctcaaccaggtttttctacatagactcatgagggtcagatgcaagtacccgtgaattccacaagctaagccatcggggatgagggtggtcttcagcacccttttgaagcagtgttaatgtccatttctcccccagcagcaatgcctttcttggccatggtggaggcttaaggttggagctgaatgttgaactcactggagatgttctgccttcatgcagcccagtggcagctgggaaagctggaaagtagatggacaagtagtaacagactttgcatgtactgtatgagacagctgaatcctaagcggcagtggggaaaattgagacacaattaaacttgcagctcacaacctccaaaaggcttggaaattgtggtatcaggtatttttggaagtgacggttaaaatggggctaagaactggagaattggttcaacgtttgtattcttagaaaatgctaagagtagatggcacagtgttctcaccacaaaaataataactatgtgaggtggtgcatatgttaattagctagattgagtaattccacaatgtaaacatgcttcaaaacatgttgtacacagtaaatatatataattttatctgtccattgaaaaaaattaattagacctcagacccctactcctattctcagcaactaatactcttcccatttcagctgaggactggaggataaagcggaatgttctctaatggggataaagcaagaggtctgcatgggggcaccactggcacaatggagggcagcacgcccggggcgaatacagggctgagacttctggagtatctcccacttgctctcagagtgctgtcccataagcctgtactctctaggcagaagatctgcgtggctttccctggcagagtggaccagcctaaagaggacagccctaagggggccctaagatctagccaacagggcgttccagctgtggggccttagagcaaagcctagtgcatcataagccacacctgtgctcacaatgtcccatcagtttttggtggttctctcttaaataaggtccatcagttaaggatccctaaatgtccctaaatatcttaggaaggccttgaaaatagaaaccaaagctaacaagcaaaggatgcctatttaaatcagaatatacacgaggaaaacttaaaaaaaacacattattttctgtctttagagggataagatattatatccttgatacagaagctgattgctatgtaaagggaaaaattaaaacattgataattaagaaatgtgatgactgagtgctatgaatggttagaaaacaaaattgaagaatatccaagaaagtagggcaaaaaatcagagatggaaattaggagtaaaaaaaatatgaccattagacagtccaggaagtccagtatctgaatactaggagttccagaaagagataactacaaaaacagaggggaggaaatcaccaatgagacagttctagtacatttgctagaacagaaggatattagtatccagattgaaatggctcattaagtgcccttacaaatagatgaaacaggcctatcccaagggtacatctttgtgacatctcagaaaagtagggacaattggatcttacaagtttctaggctgggcacagtggctcacgcctgtaatcccagtaccagaggcagaggcgggtggatcgcttgagctcaggagttcgagaccagcctgggcaacatggcgaaaccatgtctttaccaaagatacaaaaaattagcgaggcttggtggtacgtgcctgtagtcccagctactcaggaggttgagatgggaggattgcttgagcctgggcgatggagcaagactctgtctcaaagaaaaaaaaagtttctagaaagaagaaatgtattacaaaaggtcaggaatcagcctgatttacccgcagccatgtgggaagctagaaggcgaaggagaattgccctcaaagttctgaagaaaaatgatttccagttgacaattttatatctgatcaaactatcactcaagcaagaaggtaaaagagaaacattttcagataggtaaaaatataaaacaaaaagaaaaaaataaaacttagcccgatgcaccttctctcaggaagctattggagttcttcaccatgaggagggagtaaaccaagggaaacataggatcccggaaatgggggccaacacagaagatggagtatgtgagagggggcccttcatagtcgtgataaagtggatgcaggacattgatctaaactaaatcatgacaaaactattgcagaggatagggaagaggtgaaagagggctaaacccttaccttctatgatgaggaaaaaaccttaaaaatcaccaaggggctacataagcatattattaaaaatatggaatggaataccaaaagaaacagctaaggaattgaaagcttattgttgttgaggggcaggttggggaggggggtaagaagagaactgtggattttttttcttcaatgaaccttttagaacaaattgactctttaaattatgtgtataggccgggcatggtggctcatgcctgtaatcccagcagtttgggaggccaaggttgggaggattacttgagcccaggagtttgagaccagcctggacaacatggcgagaccccgtctctacagaaaatacaaaaattagctgggtgtggtaacgtgtgcctgtggtcccagctactcaggaggctgaggtgggaggattgcttgagtctgggaggttgaggctgcagtgagtgcagtgagctgtgattgtaccagccttggggacagagtgagaccctgtcaataaataaataaataaataaattaaatgtatgcataagagataaagattaaaactagaaaaatgaatagctgattattggtgtttatctcctttagatttctttctttctctttttttttttttttttgagatgggagtttcgctctcattgcccaggctggagtgcaacggcataatctcggctcactgcaaccttcacctcccgggttcaagcaattctcctgcctcaacctcccaagtagctgagattacaggcatgtgccattacgcctggctaatcttttgtatttagtagagacggggtttcaccatgttggccaggctggtagcgaactcctgacctcaggtgatctgcccgcctcggcctcccaaagtgctgggattataggcgtgagccaccgctcctggcctagacttatttcatgtaagtaaaacaagagtcctgtgttgtccattcatttattccacagattttgttttgagtatctgttatgtgctgggcattgaggcaatttcttttctccttatttccccttgttttcattgctcctgttctggaccgtcctgctgggatcctatttaatttgctagttaccacctgccctatacgcctctggatttctgctgggtgtggctgtggccctagtgcgatgtcagggaggtcttacttaatgcttctctcatgctctccagtggtgagttgtcagaagtggtacgttttgctttttcttctgagatgggagaagcgtgctgtatccacagattcctagctggcacagttgactgtttatttgcttagcacatggcctgacacatagcagacactcagtggctgaataaacatggtaactgtgacatgtactcactttctctctcctgtctctgatcctcaaagaggaccaaatatctgccaccctgcatcctcagacggctcgtaactttggcaaaaaggggccaccacagagggcctgctgcagccttcccagttccctgttgtttccacttttgctacctgaaatctaatgatttgagatccagtagtttgcgtcttgaagaatatttggaaattaaggaaaatacaggtgtccctaagaggaaaaatactatgacccatcatcacagtaatttccaacctggagctcccacatgctgggatctcataacaggcataatggtggccagagagcacttcttaatatttcaaaacacctaatggaaactgcccatttatttaagataaggctgcaaagagtaactaaaatggcaagtttctttgctttccagtgaaagagtatcgatttggtatggtagctctggttattttttattttattattattatttttgagacggagtcttggtctgtcacccaggcgggagtgcagtggcttgatcttggctcactgcaacctccgcctcccaggttcaagcgattctcctgcctcagcctcctgagtagctgggactacaggcgtgcgccaccacacttgactaatttttatattttcagtgcagacagggtttcaccatgttagccagactggtctcgaacttctggcctcgtgatccaccctcctcggcctcccaaagtgttgggataacaggcgtgagccaccgcacccggctagctctggttatcctttgctgaacagatgcttgagttgatagctgtctatctgtgataaacacaagaatggaaggagagaataatgatcaataacagcttatgtgattgacaagaccttgccaaaggcagtgtggatgtggtgggatgggaagggggtctctgggaggggagagacgggggcactgcatgctacttagttattcctggggtttgttggcagctgcactgaggacagagggctccagacaggggcagagcaggggcacagagagtggtgtgaggctctaaacgccagcttggtcggcccactttgtcattttgctgagggctggtggaggtgccggtgtggctgtgccaggggccccgcctgtcacctctccctgcaatccagaccccatcacagagcccatggcagcggagataaatgcttcggcaaggcaaacgaatctagagggaatgggagcctcaagccgtgaaaaatgatggggactgtggcctactttcttgctttgtaagagtcacttgcacttttctggggcacagccaaactgacggtgctgtagaacaggatgtgcgagaatgctgtttggcaaacaaagagcgctctctggcccccagaggttctggcttttgagcccagactaaagaaagccaggctggagaccgtatatcaaactttgcaagcccgtttatataccttgctggtgcctcagggggcagaaatgctggttggggatctttgtgttttgttttgaaagagtgatgtttggaagcagaagcactcaaaaatatatcctgacctctggcacttagaacctccaccagagcttggcacttaactgttctgtttctcgtgatatgttctaattatctgtttccagccagattgtaaggtcaacaatggtagtttatttacgagtaagtcttagttttctcatctgtaggaatggggataaaaatgcaggtttgctatgagtgttaggggttcagggtttagttttgggcctaactgctcctgtctacctgtctacccttccagggcctctcaggacacaccttactcccaaagcacaatatccaaatggcaaagaggttgtccctttcttaatgagctccacaagcacctgaccaccaccccctcccattcgaggcctccctgtcccctcccgctgaacctaaaccgctctgaggagcagctctccagccatcagtcctgcttggatgaggatgctgattttgtgtctagggaaacaagtctgccccgtttgccttccacatggaggctgagggtacaagagaaagttgggggaaatagcaagcaaagttcagagggcagtggtccattttttcttatcagccacaaaacaaaaaataaataaaagaaggaggaggccgtgtctttgaggcacagtaagcctgcccactgaatgtccctgagagtaactagttataatagctactccttctacagggagacctagagacggggcagagagaggaaaggacgtgcccccgtgaatagcagaggggtgaacagtaggcctgggggagaaattgccttcctgacaagaagagttggagatgatgaatacaaaacccctgggacactgcctggcccatagtgatgttaccatcagtagtggctttgccgtttccagattgacatccatgccctaaacagagaactttgctgagatgaaatttccttgttggtatacttttgtgaaccactccattgagaaccagcacaaagccattgccttcttgaacgtcttcattaaaactagaataatctctgcccctcatttgcccatgcacatggaaaacccacggatatgccttccctgatggaaaatatgaccactgactggagttcgagaccagcctgaccaatatggagaaaccccatctctactaaaaatacaaaattagccaggcgtggtggtgcatgcttgtaattccagctacttgggaggctgaggcaggagaatcacttgaacccaggaggcaggggctaccgtgagccgagccgagatcacgccattgcactctagtctgggcaacaagagtgaaattccatctcaaaaaaaaaaaaaaaaaagtgaccactgaaatgtgtataatgctttaaaattgacagtgcattttctcatccatcatttgagcctcacaacagccttgtgacgtaggcagtattcgtattctcacttcaaagataaggaagcggatgctggaatggcttgggcaccaggccaggttcatacagtaagtaaatggccaaggcagggtgtaatctttggactccacacccagcgctccttttttttttctgtcatctgtgatgcttcttccaccctgctattgatagcctaggaacaagatgtgtgacttttcttaccaccccctggtgggtacatcctgggtacacttttctgttttctagtgggggtaaggaaaatggctttcagtggtgaaggttcacagaaagaatgggatccagaagcgtcttccagcatggtccaggtgccagaagactttggcaggcgagttgaccatggctgagtcaggccctcctcccccgctccctggattttggatcgattttgcagcggctctggcggctgcatgtgtttcccttggcctctgaggcattccagtgatgatgatggctcggcggggtcacggccctgtacaaagcaagggctatttgtggctgatctaaaacataactggagccacctgcatccgaggctggcttctcgggctctgggtcccataacccagctggagtaaaaagttcacgttcccgtgtggagtagataccaaaagtgacgtctctttctttctttaggtttggctgcgtaattggaaaaccaagctgcccgccaccttgccgtggcttcttctatccctagggcctggagtgggcttcctccctcccctcctctatctaaaccctccttgctgcaagaccctgctcctttcacggagtctccattcccagaatgtatgtgacctcattgtttgtcatccatgttggggcttttaagaatatccccttgcaccattttatgactgcttcatggacaataatcctgactgtgttctttggggccagacactgggtctgctttccttcctctctcacagtgcctggctgtgctgggtacacatgaaggctgacggttcactgaatgaggcattgtggagggcgtagaaaacatggagacctgggaacccagagaccaggttttgttgccagggcaaatccctttgcctctctgggttgctcagtccatatctgtaaaatgagagttgaactggatgatctttaaggtccatttcaaattcaaagttctggaactaattgtagactaagccgaagagatgctcattgcctttacctgtctctctctgctccccatattgcagcctggtaagctgttgtggcttatcacccgcacctctgatttgcctgaatgtaacttaaaaacttgtcttcataatatcaggaaggtcacaaaagagaatgagggagtgttgagtagtgtttagaagcagagactggggaatcagacaaacttgggtttcagtcttagccctaccacttaatagttgtgtggccttgagcaagtcaccttgttaagtaccactttcttttcagaaacatggagttaatgccagtctcacaaggcaatggaggaatatgtgagataatacaggtatggcgcacacacagtgtcagagctcactcaatggtggcagtcatcgtcattgaagtggggaggggaaagaagcagaggggtgtgttttctagtcctttggtgagcattttctgacttgtaaactattggttgcattttaagacagtgcctttatcattttcataagcagtgtaatgatttgaggaaaaccattttagttctaataagaacactagcagtactaattgtgcacatgatagcattttaatagagttccataatttatggaattgggaagacttacaaaaacatgggttgactctctagagtcttaggtttctggtgagtgattcaaacaggctgctcttgcttcctgccagtgcaaataaatcaattgtaaacctgcacttttaaacaaaattgtgaaaaaggaaacaaatccagtgataagaaactattttaacaagacacttcattcttgaggtgatttgctaaggagagattttccagattgtccctgaactaccaaaagcaacagacacactgtggtacttgcttctctttttctagctgctctgggtttaagtaactgaagccttctcaagtattaaatttggagggtggctcagtgatctaagcaatgaagacccaagaaagactttgggtctgaatcaaagttttccaactgccttgctttgagtgcttggaaagtcacttcctaaccttggatacctcaatcttaccaactaaaagagtggtagatggcgggatgaacatcgcccagctttagacagtgaaacctggatgaacttaacctggcttaagatgatccctttctgtttaagtggaaaatgcatggtgagtgaacattacctttcaagcaacttctggacagagtccatatgtgtgtgtgtgtgtatgtgtgtgtattagcctgaagttcaagtacttgcaaaggtttctagcacacagtgtgcagtaggtgagctagacttagttagacttaggacttccagatctcccatgtcttgacaattgtgtttaactgagttttaacattgactctcagagtcagaaagaattccagaagataaaggaaaaccagaaagccaaactttaataaatactcagagagcaaaaagaaataatggaaatggcatacgtgcagagggcacgtagttagtgaagaaatagcttttgatgaaacaggacagggtgaaacttcaaagacttgtcttttatccattaatcccattagtgctccagcgatttctcaaagattgattatctctggggaaatgtgttacatcagccctcagctttccagtcccattagacccagcaaacattctgtgctgctgggatgatgggcttctgtgccatgtttacccatattcctccagcttggccccctcctcaccagctccagtcaggaacagagagaggcctctaccatcagtagtcattctttgggattatcactcacacccctttggaagggaagagaaacataaagataatgggcaagcagcatgtgctcaggttaactttacattggctgatcaattcttcatatagccttgggcgtttattaggactttcatggtggatagacacactgtccccattcaaagtgcctctaaattagaagtgagatacctaaggagtgtcagcaatgaggaacaatgggcttctcttgaagtcttgctctctgtctagtatggtgggcaaaggaatttatcggttactaattttataaataaccttctcacagtctctgttttgtcatatgtaaaatggcagcaatgtaatgtatccctcatagcgttgttaggaggactaaatgggttagtatttgttaaatgcttggcattgtgcctgcctcacaccatacaggcactcaataaaagttagctgaaattatgttaactagtctaagcagaggattagtaggcacgttggaactgatgctaagaaggaataagactcaccttgggaaaagtggggatcagggagaagactaggcagcaggcttctgagtgtgggagtgtgcaggatgtgagcacatctctgcagtgcctgcgccctccttgccacagaaataacctacaccagacgtagtaacagaaaaagaacccaagcattttcaagacaatgtgagcaaggtagaaaagggcgacccatgagtcaacaatactcaagcttttatcagtctcagtttcttcattctttgtttcattcattcaacccacgtttatcatcaaacctgtgctgttgattgatgttatagataaaaatgaaccactccctactctcaagaaagcagaagaaggaagcaggtaagtaactagacaattatataacaagttcctgagtgatcaggaggaatgaagtgccctgggaaggcttctgggaggagttgattcctaagattagatgagtgagagttatctagtgaggggaaaggcatggatgacagagcattgtgtgtgacaaatccttgtctgctaattctcacatttaactcatctcagagtcagtctccattgattgcctattaagtatgggccatatttttatgtctagtaattttggattatattctagacattgttgatggtctagtgtagagactatggattctattatgtttctctggagagtgttgactttttattttagcaggcatttaatttgactgaactcaaacaccaaactatctcctccatggggggcagaagctgaaatctctgatcagttctattaattttagatgggttgcttggaatctgccccatgcatgtatagctcaggagtcagccacagatttggatggagtttatatgcagaatttggagcatcccttctgaggctttctccttttggggatttctgcttccattttccagctgccccaaccatttgctccttccattttccagctgcccttctgatcctgcagatttctatctagtttctaatcactctatatactacagattgggttctgctctcaagcaaaaaactgtgaaacccagaaactcatccaatgctcccttctcccaggttctgcctgctttgagttgctctctagtgcatgcaaataggtatttttaattttttgctaagtaatagttatgttcagatgataggtccaatatacactactctgagatattggaagcaaaactcccacaatggatatttcaagaactgcaagtaggtcagtttgtgtgtgggggggagtgtttgtgtacatgtgtgcatgcgtgtgttacaggggcatggaaatatgcacagcttaaagaaaggcagaggtcagatcatcaaaagccttctgggttatattaaggaatttgaactagatcctgaaggctgtgatggagagctttaatcttaagagtaaaatgatcacaactgttcttagaaacattgctgggcatctgtatgaaggatgaatcaaaagaggtagaaagataggggattgatggggaaacagaattcagtttttgtcctctggaagatgaggggttgaactagatgatcattaatgtctcttatggctctagtattccgatcttcccattaatgactttacttggtcctactgtagccaggagttcccacaaggctgttttttgcagagcactatacacagcccttgaagcccaggctttaaaaaatgccatttagtgatattttatggcttgtgaatagattaaggtaatggaggcacaaaacaacacaaatgaatgcaccacgggtgggtaacagcctttgaatttctccagctctcccttcagacctcctgtatcacaacaggtatttggtcattttatgtgatcttaaatggcctactattaacctgactttgattttttttcagtcctcagagaggtggaggtgggcctagcaagaacccaatgctagggattcattgcaaagtgtacccaaattgggaagggtgagaagctattctatgatggtcttatgagaacctcaggagatgctggtggtggtgtgatgggcatgttggtttcatcctttcctgtttctgaaccaataggaaaatgaggcttcctgagcctcaggatgccctaccctttctaaggcttcctggagagcaaagagttcctgctctgccctggtgtgagtcagagactgtgatgacacactgaacagcaacacctgtccttgctggggaggggatccaaagtccagccgctcgccttcagcatgacacatttttctgtgctttgcctcgttaagagctcaggtcctttagtgcttgaaagtagctgagtgcaccacctctgtaaatcgatcccgcactcagttcgtgaaacatcaggttttaggaattggagaggcagcaatataatttttgtgtgctgttgcttgagtgaactgtaaaccaaggctttctacccaggattgcacggctttttactttgatgaatgtcattttactcagagctgactaaatgatattgtcttatatggctctcaaatttttctctgatctgttcccaatctgaaacgtgtgagtacatcacttcagatatttgctaggcatctgagcttggcctgaggatattcaccagcatgattgagaaaacatgcttgtcctcaggaaggcccaagtctaagcacctgctcatgccccttccttggctgtgtggcttttctacgctgcaaaccaagcttgtagacatggtgtacctttccataacaggtctctctcttctgtcatgttgtggtcactgaattggatttggcagaaataccagaaagtggaacatgtggtcgcagcatgtgaccttcaagtcaggtcacggctggcatttgccagcctctgtttgttggttctggtggaatcaggcctatgtgtggactctgctcctactatttgagggcattgtgaggccttttctgagtgtgtctcctgcctccttgactccgggcctgaagtttctgccattgatgtaactcatatgtgttacagcattgcctccagaattctcctatttgtgaaggcctattctgttagaacaggttgattgaggagcacattacctacttctggtgctccatctggggactgtggacagcagaagagtggggtgaggtgagcttgaggggttgagggagagtgacacagaagagcagggctggctcccctgaaacaggaggctcccctgtcagttgtggcaggctctctgcctggttttttccactcctttatccccagcacttaacctcatgtttggctcatagtagatgcttaggagatgaaagcctcatgtccaaccatggccaacagttaaatctgtgaatctcaggcttgatttcagcttggccaggtctgagtcattaaaggacgctttgcatttttggatagtggaacttttgccatcttattctttttccatggtgtcatggctttggcatgatcagggttatgaaaaaagggggataagccctctactctgctttacctgccgtgactgagatcagacactggtttttagagggaaatgtccattttagagcaagagagagaagaccttaagcatgacctaaagaaaagagagaggccaggctgtcccaccacttcatgcttggttgactgagccaagtttgactgcaagactgggtcttggcccaggatggagaatattcactaatgaggcaattgacttcaagaagatcaaaataattagtcagttttcactgctatagtgagtcacccttgtgaagacattatgttccaactgaagagtgagggagttgaggtggaagtctcctggctcctgctccctggggagtgcagagtgtgtctagaagcctgggctggtaggccatggagtggggacctgagctgtttccttctgcctgtgctttttctctttcctctcccacgttcactgggaagcaaggaagttgaggacacgttacctcagtacgtaccacaatacgcattagaggtctgcttcctaggcccgtagattctagggagggcactccaggcctgcaggggccctgaggcaggggttggtgggcatgagaatgggacccacccctgctgcttgggagggtatgtgttgcccttggaggcagggagaagggctggtctgtccctgtgcttgggcactcccatctgcacagtgccctgtggcagggagagatggcctcagagcctgtggttcctttaccgtggatggcttttcacgtgtggggctggattgctgagaacatcttttacctggcggatccctgaataggtgaggtggactcgggtctggaaagttaatttacatcttttctgaaggccagggaagggcaggggcagcctgacctgtcagggcgatacagtctgtagctgtttggccagagtgagaggagtgtctgatggaacaggacttgccttggaactgagcaaactggccccgtagagattaagccttggacctttgttcgcctgagtcccccaccccagccagctcacagataggaggctggagaagggagtggggtggatcacacgccatccccacatgctctctgtgggcctgttctctccacgtgcgaggagggatgagcattctgcagggagtccgtcaagatgagtccatggtggaaaagctcacagacggggaggtggggactccacagggttccgccatttcctgggaagggaaccttaggaatgtcacttaaactctttgagccttctttctcttctttcctccctcccttcttcgttttctccctctcttccttttccccacaaatattttctgagtgcccatcaggagttgtaaatgctggaaatgcagtgaagaatagcatagacaaggctggtgctatggcaggaagagagggaaaaatgaagcaaacagctaagtcagtcagactttcaaatacgggtaagtgctttcaagaaactaggataacaggtggagaggggcatgcgactatctcagatagcagaggagaggaaggcctccccgagggaattccacttgggctgtgaccctgtgataaagagccactcatgataggtctgggaggacggccactatgcacagaggcagcagcacatgccatggccctgaggagggaagaccagtatgcagatgaccacagggccctatgggaggacagagaccagtctctgaaccgagctgtgggagagcgtgaatgcagggttgttcctgctttggaccgtggacaataaataaactcctattgtgcctagaaaccgcctcagtgttggggtgtgtttgctgcagcagctagtgccaccctaacgactgcagtctaatcattgtgtgtggcagtacacacaggacctgaagcaaccaggagcttgagcgcagggaagtaaagctcattatcacctcagcaacaggggccctgggagaaccaaaggcctgctcctctctgccgctggctgtttctgctagtctgagccagaggctctatcctgctgtaatgtcagtttaaaaggcagcctttccagactcttgtcacatcaccaggagctcttggtcctctaattaagtagtaatgtgcttgtccaataagtgccatatggttgcaatgaatcaaacccaaattatcttagctctaaaaattaatattactaattatgataatctcacaattttatgtctgcttttcttctgaagagctcaaaatgcaagtattaaaataatatgtccaaatatcctacattaggaagaaaggaggacccacggagaagttgggaagatggcatccaacgttaagataaggctcccgtctttctcttgtctttatctctgacttcataaagatagctagtctttcctggcaataagccagaatagtgataggattagggaaacgggattatcttaacgtcacagaaaggagatgaggcacaaataagggaatgaagctaattagatactgcaaaatgccaagattggagaaaactggaatagacttaccctgatggaccttgtctgtggagaacggatatagggtgggtccagggagactggccagccttggctggggcctcatgggaccagaagtggcagtggacagcagagttggtgaggagctgggagggggattcaccaggaaggactgagttctgaatggcagggacgtttgcagacaggagactggcgtctgtccaggagagagcagggcttactgtgagcgagggaagcagtgggatgagtgtgtccggcggtgtctcttacttaagagtgacaaaggaagagtgcaggagtttccgtgtttggccctaacccaggtccacttcactgccctgagagatgtagtgggatgatggaggggactgggggcagagtggatatttaagtctgaggggagaagttaggaaagggttgtgggtcacagaattagagagttaccaaggaaactgcagagaccattacttagtcagttctccatttccaggaaggtttgtcaccataggaaagaaattcattaaccttttattcaacgggtattaattggctatcatgtgcttttcttaccccacaagagcttatgatggaaggtgatcatacaatttatcatccaaattgggatacatttgagaaggaaaggcggcagattatgtgggaacaaagactggcccatgccagctgggacatgtggtcaccttacttatgatctatgagatgtataatcaccccatttgttgataccaggtgcagtgagatgcatgctctatgtgcagtgtgtgttttcaccctgtatccccatcttctgctgggagcgggactccctttctccccgcctgagcctgttctcctcagtagcaggatccagctcaagccctacccccacctgctccaccacaactgccccactgccaccaccactaggcttgctccttaacctttctgtgcctcagttccctgatcagtaaaacggggctaactatagtacctactactagaactgtgcctgactcaaagtaggcaccagatgtgtcctgctatgatgatggggagccctgtgatttggtaacttccccaatctctctgcacttttgtttcctcatgtgggaatcagggacaatattacctaccttttaagggcctggaatttaagaaaaattagcccccttcccccttagaatcagcagcagacatcaaagggcgagttttaatacttcccacacaagttcacagatttattacataatatgtttagttgtggttaaagaacatctaaggggcgaaggagctgcccaaggggaaggaggcagacgagagggacatgtgtggctttgcatggaaaagggaagtggtatcccagataaatggtggccagccttcgagggctctcaggcaagagagaaaactctagacatcaccagtgcctgggctttgttgcaggcagaggtgctttctctagaagggaaagcaagtccctatagtcataaaatgagcagctcttcagctgctagtacttgacctccaaccagaattgatggggtgctcagaactattctaggtactttgaatttttttaacctcattaagttcatctataagacaggtagtttttatattttaaaatgattttataacagaaaatttcaaatgtaatcaaagagacatagataatgagttcccgtgctccagcttcaacagttataaacagttgctgatttggttttatctatttccctcaagatttttttttcttttctgggatgtttggaagcaaattccagcaattatataatttcacctgtaagtacagtttacccttgaacaacatgggggttagagatgctgacccttggatggtcaaaaatctgcacataaattttgactcccgcaaagcctaactactaacaatctactgtttacctgaagcctgactgataacataaacagtcgatgaacacatattttgtatgttgtatgtattatttagtgtattcttacaataaagtaggctagagaaaagcaaatgtcattaagaaaatcctaaggaaggtaaaatatatttactattcattaagtggaagtgaaccattgtaaaggtcttcatcctccttgtcttcacattgagcagactgaggaagagaagtaggaagaggaggaggaggagggcggctaggtcttgccatctcgggtggcagaggcagaagaaaatccacatgtaagtgacccacgctgttcaaacctgtgttgttcaaggtcagctgtactttggcatgcatctctaacagacaagatttaaaaaaatatatatcaccaaatgcctctatcactccagacaacaataacagtaaaacgcaagagatccttaacatcatctaatattcagttcatatgtaaatttcccttattatgtcgaaatatctttgccggttggtttgaatcaggattctaataaagtctacacattacatttgcttgtaggtttgtaaatctctttttatctatgattgttccccctcccattttgcatgtcatttgtttgttgaagaaactaggtcagttgtcctgcagaatgtccctcattttgatttggttggctgcttccttattgtcccttaatttattccttcatcctccatgttttctgtgacctcggagttagattcaggttccgtttgttttgaagggagggtcaaggatgtgccagctgtggttatgccccttcctgttgtgacactgagatgggtgggtgggctccgggattggcagcctcatccttcatctattactgaggccccatcagcctttcccctgatggttttcacatccattgacgattgttgcccagatccattatttcattagggcttgaaatgctcattttctgattctgtcattccttttgcgttgagtagctggaattcttctataaagaagaacgctctctcatcaacagtttggttaccctgaaataccatgtggcagaaaaagcaggacaggtgctttctcatcacttaccggctttcaaagtaatgagttggtcccttgcaaaggaggataggtctttaattaattgattaaacaagtatttattgagttcctgctatatgctgggtatcgttctaacatcctgatggttcagcagtgaacaaaacagataaaaatccctgcattcttggaatttacattccaatgggggaagatggatagtgaacaaattggtgtgctatatatttagttcagggatgatacaggctatggaggaaagcaaagcaggacagggacatgaggatgctagaggggtgggatgctagaggatgctaggaatttgggtttgcaatcttgaatagggtaagcaggctcaggaggtgacatttaagcaaactcttgagaaggtgagaaattgctggagaggagcaggccaggcagaaggctggagtgcgtgaggtagggatgctggtgtggagcccgtgtggggaagatggtaggagacgggcctagagaggtggttgcaggggcagaccaggcagagtcttagaaaccattttcagggccttggttttcccctggatgagatgggcagccctggaggactgtaagcagaggtatagtctgactcacgtttttaaagggtcctgctggccgcttggggagaagatggagaagtcaagtaagggtagaactgagtttaggcttgaaagcagagagccttcagccctggtcaagcttccttccatgtcagctagggcctattgggggggttggagctggggggcagcaagtgcttcacctgttcctaggggttctctgtgcatgtggcattacaggaaatgcttccaactcaatcccgtcctttaaaattcctaggcatagcattctcgagcgcttcaggacataaaatcccggagcagaaaccttcctccccgagtctctaaacaatggctacatgtccatcaccccagagaactggaattccattttatactgaaagtgggatacacgaggacaatgctatcacttgacccatcttctttcatggttggtggtgagtcttttggaccgtctttaccatcactgaagaattggcattggctagcaaggcacattcagggggaacttctcatgattccagaactcagcatttgtggtgggatcggccatcagtctacggagggtgacccctccacccatggccaggtcggcttaatcaataggtgtctgatggcataaggtgcagagcaacagggcaccttttcctttccatccagattttcccagccagcttggagagcactttttacccaggctgccttcccaacacccagagagcccttctgtggatgagcatctctccttgcctgtaactctctcctatcaaaggctgctcgtgaatttctgggtgcttagcaaccaggagaggggacgatacaagccgcctctatccctgtcaggtagctgctcccgttgttcgtcttctcctctgggtttgtatatgcagtgaaagtagccagagagacactccacctcaacttaaacagcaacttcctaaataaataaaaaatacacagaatccagttcaagcagatcttgcctcaaagacagcttgaaagcatcccttctcattattccctgcctgatttccagtgtttctctccctttctttctttctctttcttttcttgtctttccctccctccctctctctttcttccttcctctcctctcccttccctttccttccttccctttccttccctccctccctccctccctccctcccttccttccttccttccttccttccttccttccttccttctctctctctttctttctttctttctttttctttcttctcgctctgttgcccaggctggagtgcagtggcacgatcttggctcactgcaacctgcgcctcctgggttcaagtgattctcctgcctctgcctcccaagtagctgggattataggcttctgccaccacaccagcctaatttttgcatttttagtagagatgggattttgccatgttggccaggcaggtcttgaactcctgacctcgggtgatccatccgcctctgcctcccaaagtgctggaattacaggcatgagccactgcccgtggctgatttccagtgtttctatgtaaccctctgagattcccacaagcctagcatgaagatgagacacaccaagggaggtgaggagctaggagaagggcaggcatctccaaattgcaagtttcttctcaaactgcagatctgcagagaaaaggaaggacacagtgaaggaagcagattctccaaggaagggatatcaggacttaggaatggactctttgcctcttattaaaaggaaagttgcttgctggggaagtagcagattatttcaaatgggtatccgtccttggtagccaccaatatccatcagtttaacaggagaggaaatagagttgtcatgccaggaggattttggaggagccagcggctggctatcgagaagggaagggagctagcacttgctgagtttcttcaaggggccatgcactaactgtaggaagcatggactttgctttttgcatgggatgaacctaactcagagttgatgctgcatgtaggattatgtttttccgacaatccagggatctgcagaaggcttgctacaggatctgagcaggagtctaagcagttgtcttgtggtatcaatgctcctgtgtctggagagctggtcgctaagacctggagtctgggccccttgtgggggtgtcacagaaggctgtgaacacctctctgctcctggaaaatgccttcctttcctggccccaggacagactctccgacttccttcatgaccgggttcccactcgggagcctttggaaccgcttgagtaccagattattaacaggacccgtgattgtgatttcttcccccgtacaaattcacagaccctgagaagaaaaggagaagataggctgggcacagtggctcttgcttttaatctcagcactttgggaggccgaggcgggcagatcacccgaggtcaggagttcaagaccagcctggccaacatgacaaaaccctgtctgtactaaaaatacaaaaattagctagttgaggtgacaggcgcttgcagtcccagttacccaggaggctaaggcaggagaatcgcttgaacccagaaggtaaaggttgcagtgagccgtgattgcaccactgcactgcagcctggttgacagagcaagactctgtctcaaaataaataaataaataaataatttaaaagaggagatagatgtgatggcggtcttttctgtacttagaacaacctaatagttatttaatggataaacaggcattaaaatgaatgtttgatgacttggaatccagtcttttataaaactctcagtgttctgtgattccaggcactcatggctgtggcaggcatcctgccaggtggagctgggagttcagcacagaagtaagtcggggaggaggtatgcattgccacagacttaggaagtgttccctggacctgctgatgataggttggtcttagccatgttcctgaacaagtaagttgtctaatgaaaggaaaacataccaacctgttagtggagttagcaccctagacccatagactctaaggttggaaggacttttgaagtcatctagccccttgccccactcgatgcgtgattaatacgcaccacagaaactccgggctctgaatactgaacattgacccagacccctattgcgttagaaaatattattgcaattagtggaatgctgctagaatattggctccagacctgagtctcaaagttggaagagatttagaaagaaggatgtccagaggaaggaacagacatgagtgaagttggaaaatggagactggcaaagagtagctcgaaaaagaacaaagtttcctaataatgaccacaaatgagtatttggctgttcaatggatatatgcttgctccacgctcattggatgctagcctgctctcaggaagagctcttgccttcctgcctccaaaccactgtacacaccgttgctagattgatctcccaagaatcagcttctaccatgctctttctctgcttcaaatgaaattttgatcatttctcttcatctgacaggtgaaaatcaaaattttctgagcttggtcctcaaggcccttccttctccactcatcctttggccaggcaggccctccaactgcctcctgagcagcctcactcaggtctttgctcatacttgctagaatggagagcacgtcttctcgttccctgtaaccccaacagtgtctgttgtaaggttgagcacacggtagatggatggatgaagccttcattctgagtaaacacgcatgcaagtataaacacatacctacacacagaaacaccacacactcttaagtgtagatgaagagaaagaaccctttctttcttccctggtgtctggcaaaggccaaaggggtggtggggaaagcattaggatacagaggctctggttcttgttcctccctggaactggcttctgctaggaagcccagcagggcctgagtgctggcaagcctggcatggagccctcctgctttggaggaagcgaaatgtcccagcaggatgagtcagtgggagaatggaaccagaaagtgagtcattttgggagcagaggctaaaggatcttctctgctcaaagatattttaggtcttggtaggttttccccacttctcttgtttagatataagtttggggcatgtgactacagtggctcagttcccagatgtaatgctgagagactgtccagtgcgctgcgttctagaacatttttgctgatagggaggccgtaaagtgaggggctggttttggagccaggcagattgggttctaatcacagcgtgtcccagaatcagctggggacctagagtgagttgtttaatctcttaaagtatagtttttatcattttcaaaatgagggttgttggaaatgtcaaatggttgttcagcaagtgtttgttgagtccctagtgtgtgtctggcacagagctgagtgcagagtatggggtgctgaatactgcagccacgcatcctgccctctggggacgggtgcagcttgggattgtgttatatttgtagcagttctgatgacaacaagaataaaataaaacacctggatttgtttcatgaacataaccctcaaatctgcactcccctattacgtgtttgggcaactgagttttggaacctacatatcagactcaaatgttttcttctggggggttacagtctggggaagacccctgtgtaaagcatgtagcatagtgcctgtggacaggagagcccagtccgtgacggcggtaacaatgatcattactacctctgttatttcctgtagccaactgacatctttgcacctctgtttcctcatccagaaaatgttcagctgaattgcagtcctttcacagaggcagttcctgagtctctagtcttggggctcatgcttgaagttatttagagaatctctaagatacaagtggagagacagctggaaggggcagcacccaggccttcagtgtggggacagagttaagatcaacatgatcacagcagactgacacggcgagctgaaacaaacaggaaaacatttgagcctgatgttaggttccaaaactcagttgctgaaaggcgtaataggggagcgcagatttgagggtcatgcccatgaaaacaaatccaggtgttttattttattcttgttgccatcagaactgctacaaatatgacacaattccatgctgcacccacagaatagtgagtagtgtgtaggccagggcaagaaaaagaagagcaataatattctagttattgtaggccaggggacccacatccacgatatcgtttttttacagctcattactgaatcctcacaataaccccatggggtagatattactgttattacccttttatagatgagaacactggagcttagcgagggtaagtaatggactgcaaggacactctgtctctggcccagaggaacagctggaggatgcaggcaagatgtgtgttaagggggtcctgcagagtgggggtaaactgattctggattactcattaatgtagaactccgaccagtgggtggagggtatgggttcaatagggagctcttcagaaatggaacatgttgagaggccaggagttctccatccctgaaagcattcaaggagaggttgggtggctgtgggaggtattggagaagggattttaacatcgggagggaactggggagattgtgtgtgagtttctgtctgcaaaaaaaaaaaaaaaaaaaaaaaatgacggtaccaaccttgaacccatgtaatcttcttcagtaatattcaagcaagaacagccaccataaaattgtgtgagcaaatcaggtaatactggtgaaagccaaacacaggctccccgttgtgtgagtgagaacatgacattgttacagtgatgggttcatgcaccctggggtgggtatgctgatggtttcttctgcttctgcttctacgaggcccctctcccaatgcctttcccaaatctctccttatggggtttttttccccctcctaaaccaccttaaatcgaaatccactcacatttgtagccatttcacagtctctttgcatattggtgagccctgtcgggggtcgctggtatcttatagtattgatgttacaaaatgtaaagttactttggggaaatgacttctcttctgaagcttttatagggagaaggtggtgagcttacccctacactctctcctttcctttgtctaattcctccacagaacatttgtccggtgctcactgtggactggaagtgtgctagggactgtgtactgcaaggtgactgggatgtgcgcctgagcatccctgagtccaaggtaggggaaagaggaagtggtccacgatgacactgtgatgacggccatcctgatgaaggcacaccccaccctgcagcggctcagggaaggggcgcgtgtgcagacatcttgcaggcagggtttagatggtgctgtcctcggaagagaggactttggaagaaggtggtcttggtttcggtccttagtccaccggatgccaggtaatccttaacctttctgagcctctgttcttcacctcttaaatggggatatcacttcccccagatgatcttttattttgtttttaaaaaattattatttttagtatttttaatagaaatggggtctcactatgttgaccaggcttgtctccgactcctggcctcaaacaatcctcccatctcggcctcccaaagtgctgagattataggcgtgagccaccatgcccagccccctgacgtgatttctatgaaaatgaaattaaatgagttaatttagggaagccacttaacataattcctggctcaaaaaaaaaaagaaaaaagaaagttttcttcccttcctgaccttgtaggagaacagagctccttcgcctgaggggcatgagtccctatgcagaggttccctaacacctgctcataggtctgtgtcccgctgatctggtaagcaccgggaatggtctcttaaacacaaagtttgggctgccttctctagagattctatttccacaagtgtgggaaggggctgcacgggaatcagaaatgtttccccagtgattctgatgcatagttcagtttgaagacgtgctaacaatatataccaacaaaagttgtctgcgtctttttctggggacagacccccccccggctttcatcagaatgtcacggtcccacacaaatgaagatgcatcctctcatggtatgtgctagcgggcacagagagtggggctggagaatgagggcttggtaggcgaaaggccccagggccagccctgctctgccctcgtctcttgccttcccgccaggtgggtcaggaaataggaacaggtggttagtcacggggctctccagcaggtagggcagtggctgaggaaatagcggtatctcatcagctctgtctctagaggttcttaagatacttagttgtcaccagcctgaaaagtcagcgtggaaaatgttccagcctggttcctgtaaacgtaaaatctgttatgaattatatccatccacgtggaagagggagacagagtgatctggtatgtgcaggagagggccagcctctgcctggtctgaaagcttttgcaattgttcctaattggcccagtctttttctgcaggaatctcctctcttttctccatcccatcccccactgcctgcagcttctgatttcttggcaaggcaagcaggcaccagagctggggctgcggttgttctgaaggattttcaggtgtgcgtgttgaaagccggcaggaagagaatgctggctctgtgtttagcagccgaagggacttgttatttaatgtgtcttctgaagccacgaggcctcggctttgtaacttgctttctttattcttataaatcttctaggatgctccatggactgtaggaggagctctgacttcccgaccatacccttgtgtttaccactacagggacagaggttcacagctgcttctggttgctgtagatgatctggttccctgataatttgagataagtttgtgttagtttggagtcttcggtgaatacgttagggtacatgtttcttcgtcgttcctggcagggctgatcatagaccacatcaacccaagaatgtgtttgcctctctgatgaggctacatctagaatatgaacttgtcgagtgcttaagtatctttctacatagtttattcattagcctgttcatttatctgttcaacaactatttcttgcttgtcaaccatgttctaggcatgtcatgggctctggaagcagagtgagaagcaaggctaagtcctgggctcacggaacttaggttctaatgaggaagacaggcaaacaaggcgccgtggagaggcaggcagagaaccttgctttccaaccctgctcagaggtgcagtctctttatatatcccacttccgctatccccaaacatgcccattagcactgacatctaaagggctcatggtgaattaaaatgtgaccccacctctgggtatttagtcatttagtattgaactggggttaaagtcctaaggaaaggcatgtggagctaatatttttggggggacaggccctactggcagccatggaatcttactccgcgtggctcattgctcctgggctttacaactcaacgcagctgtagttcattcaccatgctgtggccaagcagcaggagttcaaatgtccccactgccatctccaagttgtctctctcgggttcctatttccctggcttttgtcactcccacctcacctgtggcccacattcttctctatttgaatgtgtggcaggcaggcgagatagacaatggggaggagttgttctgcaggagagaaggggacagtccttcctccagcctggagcacttcctgcaccgctccccaccccgtctactctccatatcccaccacgccctcagggccttgccctaaccccggaagcccacctgtctcttggctgaaatcctatgggctgagttgggtccccccaaaactcatgtgttgaagccctgtctcctgtacttctagaatgtgactgcatttggagacagggtctttaaagaggtgattaagttagcatgagaccattagggtgggcctactccaatatgattggatttataaaaagaagaaacttggacacagacacacatggacacagacacacatagaaggaaaagcatgtgaagacatggggagaagaggggcaactgcaagccatggcgggaggcctcatgagacatccaccctgctggcaccttgatcttggacttccagccttcaggaagttcatttctgttgagtaagctgccctgtctgtggcactttgtcagggcagtcccagcactgcctcctgccctgtctgtgtggccctgggcagaagcggcctgggagtgtcactcacccttcctcctgcaccacgtgtctttgcccggtgggctccagccgcgcctgggcagcagtctagacttcctgcagtctctcaggcttctctgtggctgtcccgtgccgagcgcccaatgcacacttgtagcctgattgattggttttctcagccagggcacggatcgtttcctggccgctctctggctccttttccaggcacctcactcggttccctactctgaggtggctacggccagactcgcctcagcagctgcctccactacgggctgtggtttttggtgagcttctttcagtcctctcatctttatgggaaaactgcccagcccaggaccaattagcgtgggatggttgcaataaaggtctcccttcccgacatgtggccagcacagagccttccctggttccctcccggcatttagtcacagtccccagctgtgtggtcggtcctctcggctcatgttatgggtggccgggaaggcaggctgtcttgggatctaggcccaagtgactaggtccattgtgggtgaggcaaggtggccacctctgcatcctcctaggggtgtcctgaagcggctgcgggccatgggcaggtggccgctgagggggtaagggttcctttcagtgtgaaatgtgcctgtacccaagagaacttgccttcacttttttttattttaaagaaatgaagggagaaatagagactaaaaaccctgggggtcagggtctgtgagacaaactgagatgtgctggagacattgcttatggatttattgatccctgacttgttcataccatgtgcctggaattcagcacttacacgtttccatagcacaatggacatcagtttaatcataatgggatttcttaagtgattactatatgccaggtactatgctaagtcagttatcaacacgacctcctttaatcctttcgacaatccgatggggaagctctcattagccccacttgccagaagaggaaactgaggctcagagtaggttacatgactaaaagagcaggggctctgcattcaggtctgcctgacccagagtgtattatcttaaacatatgtgacacttcttgcttgccttcctggtgctgcaccatctgtttttccctgtgaggtcccctttccccacaaactggctgtgagcacacccgacccctttcctgtcctgctgcccccttgcctgtcctgctgcccccatccctcggtgctcagcttgttgccagcagagtcaaacacacagactcatggtaaaacgttatcttacatttgtgtaccttttcatgttttcagaaccttttccaggcagtatctaatttaatttttaccatcattctgtgagtgaatattttctgtcttatggttggggaaactgaggtcagagaggttaaatgattgcctggggtggcactgcctagcctctgtgtggtggagctaggacccagtcgaggctcggagttctaatccaccagtctaccctggtaggaacctctgtgcaaagccagcccccatagcagcctctctgtcttgggccaaagatacaaatcagcaacggccaggaaatgatttgcatgaggaactgaggtggggcggtgggcaggagagaggctgaggcagcaagggacagagtgggcacacagaaacttccctctggaggcctcagcctcttcccaaggctgagcatctgcgcagggcttagtttgttcattcctgggagctccaggtaagtctccctctcagagggaaaagctgattcttccaggcaagggtgaagagacccacctttctgagtcagtgaccgacaggccagagggctgaagatgtgggcactgcggtgagaaccggagtagccaaggaagcagggtggtccccacaggggcggcgattggtttgtggggtccctgcctgtcctccggagaaagattactaaggagcaaaagccgactttgctcggtgacccctcctggtgccacatccctcatgcctgcagcagaaggtggggggctccaggcccctgacaggtcatcctgatctcagagaagagtctgctgcccccaggacggggactgagctgagggcgaggaggatgccaggagaggcaccttggcccctgctgtggtattggccacaggttgggagctgcctttccccgaagccctagctttgcttctgtgagaagcagacacccagcagcataagcagcctgcctaggaggcttttcactaggaattaaaaacaccaaaaaggaacttcttatcagcaggtaccctaggggccacatggactggtaagtggtatcttccccatggtctcttaaggcctctgaagtcccagaccctcagatagttggcaactctgcctttccgcatatcaaacatctgaaaatgcatctacctcgcacatcaaatagaatatatttgctataacacaattgggaagaatggttgtattttttataatgttgagttttattaagaataaattattcattttagtcttgcaacataaactcttattctgatagataactatggatcgagatgcatttgactagttggcacaatgttaatttttgtagatgttgtgtgaaatatttattttgattttctagttttatattttggacccaatctagttttgtttctgattttcacattttttttcaggacagtgaaaaagcttataggatataagagttgaacctattgcacctaatggataaaatctcttctgtctctccccatccccagagagagagaaaaaataaaaataaaaagagaaagacactgtttcagcaaattgatattcggtttttaggcctatattatacttgggtctcaggtcctctaatctcctatttggtggtatccttataaaatacaagaagtgttctctgagaaatgtggaaaatttctgacgatcccagatgatactaaatcagttgccccaaatcctttagaagaaggaagaataaggccaggcacggtgtctcacgcctgtaatcccagccctttgggaggccgaggcaggcggatcacgaggtcaggagatcaagaccatcctggctaatatggtgaaaccccgtctctactaaaaatacaaaaaaattagccggccgtggtggcgggtgcctgtagtcccagctacttgggaggctgaggcaggagaatggtgtgaacccaggaggcggagcttgcagtgagctgagatcacaccactacactccagcctgcgcgacagaacgagactccgtctcaaaaaaaaaaaaaaaaaaaaaaaaaagacacattcccaacgtgaagcatcaaacagctcagcttttctaagtgttgggagaagtggagaacactggttctcctgggatggtgcctgggttagcaccattgtgtggatctggtgtaacctgatacaggatttctccccttgcccagtaagagagccttgtgctagatggatgcagcgaggacagaggtcccttgctggctgtgtgtgcaaatattgagcaccaaatggctaccagaggaatggggaagaactgactcgggataagagtgggatgcgtacaaggagagaaggctggagaaaaccttgcacgctgcgggagcaggctccccaggacgtgtcagaagggcccagtccatggaaacagggagacttgccatatgggccatcgtggctgcctgtgtggggactgaagctgggcgctggctgctgcgcgagatgagggggccaggtccagcttccaaagggcagcttccaggcagagggctgctaactggctggaaaactatcagcgtgtggagtggaaacctgtaggggcagggaaaccaaggaacatttggccatcttccgccattgtgatttacctgccataagagaagctaaagtaaaacagcatgaagttgtggccagccccattaaaataacgtgctcattaagggctcttacaactagtgatatttaaagaagaaagaaaaaaactcacaaaagtacttgaggcaattatctacagcaaaagaagatgcagatcccttgagatcactgacgcaagagaacaaaggaggtcccaaaagaggctgcctgtgatccaggtgagagccgaaaccttcaaggctgggtaccagtgcttcttacacctgagtgaagcatcttgggacatgccttgtggttcaacgttaaaggaatagcacagccaaccagaacctgctctttgttaatggaatggaatcctctttctgcactaaaaatgagatgatgtgaaatcctttaaaatttattggaaggagggagggctttttgtgcatgatgcgttaccaggaaatgacactgtctctctccttattgcctaattagcaatgttgtacttctgtgtgaaatggcgtgtttaaacattgccaatcgatttaaacaaaagatttcaaaatactgtaggatggagcacagtgaaaaattccttgccagccagcgttctcccaggtaaggtttttgtcattcaaggtgtggctgcacagcagggaaggctttgctcatccccgccccgcagtgccccattccctccatcagccgtttatctagcattgggtctggttttctgttttttgttgtttgtttgttttaattttttcagggtatcgtagacgtgttgggttccactaggccctgccagccattcacttatttattcattacgcactcaatgaagacataagctgtgcattctaggtgcaaaggacgtagaaatgagtataatacagttcctttcctcaaggaggtcaatccagtgggaaaacaggtgtgtttgtggaaaatggaaatacagccggcaggcgaggaggctgtagagagaggagcacagtgctctgagtagcctgtctgctgtagcaagtcacccccagcagctggtggcttcacagagtaaaggttagtttcttgttcacatcacagcccagcttggattggtggggtggcaagaagggttattcagggtctcagaatacttctgccgacaggctgtgccatcctctcaggccttggaacccgcccccttttaaacccctgagtctggctgacagataagggcccaagtcgcacccatgttttagggtctaggcctagaaagggtgccagtcatttcctgcaagtcccattggctgggactcagcctgtggccctgccttgtccagggatactgggaagtgtggtccagtgccgtgcccaggaggaagagcaggtgtggtgcacgtcagccatgtccccactccacggagcagcccgttcaccctggggcgtcaggagaggctctgtcagaggggattttgccagggagatgtggggtgtggggtgctggatgtggggtccaggagagcaggggcatgagaagagcagcaacccaagcaaggaagaggaaaaggcctggatgtgtcttcagatagagacagactgaagcgccggcccacactcaccagcagcgtggctctgggcttggtccttaggtgtcccaggtgtctgtctccgcacatcttcccaggccttctccagcgtaccggcatcacctggggactggccctctgcagtcacgctggctccaggctcaccgggagtcacgttctctggctgtgactttccttttgctgtggattaacccagacatgggcctgatgctttttctttaatgtatacacacacatacactcacacatacacacatggacacattcactcacatgcactcacatgtactcaagcatacacacatgcactcacacacatgcgctcaggcacacatgcactcacaggcacacatgtaaacaggcacacacacgcacatgtactcatacaggcacacacgtacacccaggcacatgcacacatggtctcatacaggcacacacgtacacacaggcacacacatgcactcacacacaggcacacctccacaggcacatacatgcacatgatctcacgtacacaggcacacgtatgcacacacacatacacaggcacacacatgcactcacacatgtactcgcatacacaggcgcacacgtacacacaggcacacacatgcacacatggtctcacacaggcacacacctacacatggacactcatacacgcacacatgtactcacaggcacacgtgtacacgcacgcacacatgtattcacacacatacgttcacacatatacacgcactcacacatacaggcacacacatacacactcaggcacagacacacacacacacatgcacgcacatgggcgcgcacacacacaccccctccctccctctcacggtttttggttcagcctgcactcaagtttttgggaagatggagctgacatcacagtaatgtgaatgttgaatatctgaaacttctgtgctgagaaatcccctcaggcctttttgccaggttggctgctgtgtcttcctatatttcttgccctttccacctctcccactttgctgctcccaaacaactcttaacacccaccgccccctgtttttgttatacagagcagttcagccctctccagtccccacccctgagctcagctccaagccttcttctgcgcgtggattcccgtgcctgcggactcacagcaggccgggccggctcacgtgggatggaccctgtctccttccacagggagaggggcagtaaagacgtccatttcccatgctttgaaggatgtcactgtctcagaaggcagaagctaattgtgtcggttttaagtactttttccttttatgtttaatttcattaaagttaattttcccttatgtgaaatgtgaatgctgccatcacaactggaaagttgtcgtgagaattaaagatgataatgtatgaaagtgtgtaacacggtacctggcactccccccactctccccctcctccacacggtacctggcactccccccactctccccctcctccacagagccctggaagacttggcggtgctgtgatacgtgtagtgtgtgatggggagcggtgagggacagctggagagggtgcgctgagccagagtttcatgctgtgtgtttttccgaggaggtgggcctttgtcctctgcattcagagtcagaagagagttcatcaggtacaaatgggaagagaaccttttaaacagctgtctgtttgagcagatttccccacctcggattcaagatgtcattccatgtaggtttgcatttgcagggtacacccaggagaagctgttagttgctgtgattccacacctggagtgaggggagaacatcatggtttcctgccaggtgtgctggggcttactggccctgccaggaacatctggttgaaacttgtcacgtcaaggccgggtgcagaggcccatgcctgaaattccagcactttgggaggctgaggcgggtggatcacttgaacccaggagtttgagatcagcctgggaaacatggcgaaaccctgtctctacaaaaagtacaaaaattagccagacctggtggcacatacctgtcatcccagctacttgggaggctgaggtgagaggatggcttgagcccaggaggcagaggtggcagtgagctgagattgcaccattgaactccagcctgggcaatcgagctagaccctgtctcaaaaaaaaacaaaaaacaaaaaacttgtaaaggttccatgcactccttccctgtagaggctggtgttgagagctcgccacctttccttctgtttagaggtaggaagagaactcaggcaagcgatgagcaagccgtctgaattgagcaagggccttgggttggaacccttctctcccctgctttcctggtatcacagtgctagactgggcctctgcagcccacccagccgaggaggcccttctcctacagcagccttgacaggtctgtctggcctctgccctgacacctccagggctggccatctatgtggggaagattatgattggaaggaaggtttttcttagagctgccagtctttattttctacctgctgctcttcattttgtcctcagaggaggaacgtgtcctctcttccctaggacgtctgtcttggtattgaagacagtgcttctgtgcttcttacttatcttccttgaggttagccatccttgtctctgcaccctctccctcagtcctggccactcccatgtgaacctcagtgtttattcctgacccaggatacctcagctccaactggaccccaggcagtaagaggcttcctcttagagtcagcggattcccactgatgcagcccaagattacctgccccgtcctcctcctcctgctcctcctctggctcctcccactctccctcctcctcctagtgcttctcctcctgttcctctcctcttcttcccctcctgctcccccctgtgttcctcctcctccttctactccttttgttcctcctccactgcctcctcctcctcctcctcctcctcctgctcctatccctcctcctcctacacctcctctgcctcctcccgttcctcctcctctgtgctcttcctccctctcctcctcctccctgctcttccccttccccttcctgctccccctcctcttcctgattgtcccctcttccccctcctctgagcagccatattacatagcttactcacgttgaccttgtgctgctggtgagctttgtttctccctttctgttcatgtactgttctttctcttggatattttctgccaaatgtttttcattgatgactttgctcttgggtctccttgcctatcttccttccttcccccttcctgctctgtgacattcttgtttacataccctctccactgtgagcctggtatttcagtgactggagaagttttgggccttatctgagctgctttccttgttatcacttatgttccagcagctcgatccatcttcccatgcaggaacgtttctccccaaagtcctgaccctgccgtggagcacctgaggggaggagtcactgggtttctggcctcagaggagcacagtgttccccaggacttaccctgcatccgtattggaatatctgaaaatttcatcactgttgaaaataggaatgttttctgatctaaggtcttctgaggacattggggacactttattcccaagagcaaacactgactaggatgtctttttggctatgatgggatctggtagaaagtttcaagctactaaaatagggaatgtattctaatgttgtcttgaaaatgaatcaaatacacttccctgaatgaaagaagagatgtgtgtgtgtgtgtatttaaatcaccgatagcagcagtgatgatggtgacagtcacccatgccgtgcctggcaccttgctaagtgcctgcacacattgtcagttggtccaggcggtaagtcatgaggagtgggttttagtgtcccaaagcctcagggaggttaaggcatgtcctgatcacagctggaggacctcaccacgcccctccctgtggaaggagggattcttccgcaggaaatggagttttcccacagaacacaggacaggcagggaggaactcactggggctcatggctgtgctactgctactaccactgggcaaatctctgggcctcagtttctcctgtagtaaagtggcaggattgaattggatgcacttaagtaggtttccagctctaaagatctatgatttgttgtttcccttatttcagtgacaagttcctttggaaaacattgctgtcacaagaaaaaatgccatcatcaaaatgtcttctgatgttggacaaactgaatgggggttaggaaaccacttctgtaggaagcaggggtagggatgaaggcaaggaggacagatggatgagcatcctaaacagaatagggaaataattttagaactgatttttcagggagtcgcaagattatattactctagctctcgctctgcacctggaattcgacagtgcttaggatagggaatgtcgaaaccgggaaggggcttcccctcagccccaaactcagaattcgtatgtcagatctggaaagggaccacagtgaccacttagtccactccttcattttatgtcagcatccctggagatcccagcctttgggagaaaaagactcctgaggccacgtggtccgagctcctggagcatcgctggcagaggagtgttcagatcagatggtccccagcctgtgcaccaagtgtaccatccctgctaagtagatcttagtggagcagggcttacttcagggatgtggagcttattgggatccttcagcctctcttccaataacttctgctttagagattatgatgtaactgatgagaactgtcttgagacttccttttgtacttaaagtggatggggcaggctggtttagggcagtgtacctggggcaaggagtctggggtccttctgttggtttaggaagctcctcttgtctgtctggcctggatacttgtgatttgccagcttagtctaacagttaaccacctcttagtgggaagtaatgaatccaggattctctgctacgctcaggtgataaattgtgataaagtcaagtcagaatttcccagcttaggtgttgtgaaagcccaaatgaggcctgataagatattttgagtttttcacacagaagtaatttatagatgattcccaacttttgaactgctcttttatttattattaagttggtgtttcaaacttagaaaactgcaaatggcatttagttttccaggctggcctgtttagtgcataacacagctgacacactatatggttgccataaatcataatggaaagtagtatttttgcaaatggataatgtagaattgcagttgcagactccctgaaggccttcagtggttccagccagcacatgaacacatttacactgaagcgtaaaagacggttgctttatgcatctttactctgctgtgagggccatgaggagcaagaggtcactgggtgtctgcaggcagtcccagggaagcagcgaccagagcagcagggtttagccttcttatggtcatgggtgtgtgcagccacacgacctcctgaaaaactgctcctgggctcttcagaactgccccagaccaagggtccagagttgttaggagccaggggggctggggaaagcgaagcctctagggcttctcagattttgaggaggacagaacctgttagccacctgccttttgctcagaaaaggtgggctggagctgcccagcaaagtaaatgcaatgcctacctccagagcctggctttccacgaggtacaggctggccctgaacacctgcctccttccaggtgctgtgctgtgcttttgagatcaggagtggaagctggcagaaccaagagaatgcaacacactggcctccaccttggcccagaacatacccaccacgccctcgggaagtttaaatcccatcactctctctgctgcttttccctgttacagtgtgtaaactgagattccacacttggaaatgcatgtgttcctctctgggaagacctccttgctgcccccatccccctgcatcttgtgtccactggatcctctcattgactgttgacaatgctcagtttaatgccaggcagcgtacattcagactgtaccccaggaaatctgacacaaactgtgtttcccattgattttaaaaattaagactcagtgatataatgtcacttattattatgtaataaagccctattatggctagtaatttttcagtgactagctgaattttacttattagtgttcatttaagtcagcctgtaatatgttcagtgcaagtactaaaactgcctttcttcaaaaatcagaaatttgacattttttaatcagtcaggacttccttcctttcccctcctccaaaaacatccagagaagtgagattttctcacatttaagtcaatgattgaatagaaccaaattgggggaagattaatttttgaaccagtaacaccaaactgaaattaattttactaatttcaaaatctgacagttttgaggaccctttaatagaaccagagcttctgaaaataagcacctactgatgggttcagtgcagaaatgaacccaggtctagaactgcagtgttaagagatgatttccaaacgaagctgtggtttcatttggaacgctttcttgatttacatgttctgggttttgtaagtttaattcaaatttattttctcctaaatgcatttttactaccggaaggcccccgtatggaaatcaccttctctcattatgcagcttgcctggcccagagggtgagcgggccttggaatgaggacacccgccctggctgggagtcgaggccgagtttgcatccaaagctgtagcacagtgcggcccacagcaaagggcatcctcaggaagcaaggtgcttgtgtttgtgccttcgtcctttaagacaatacccagatctggcagcatcttctgcagcaagcaggagctgattacctggagctctgcctgcctctctccccgcctctgcctccccccggagaggcggcttctgaggaggctgctgttggcggccaggagaattccttgtctctgtggaaccggaggcctcccctctgcggctatttaaatgtgttcctccggcatgaggatgactcaccgtttaacaattaattacagctccgcatattgtaggcactgcacctatatgggggtgtaatctccgtgcggcaccatgttgatgagctgcttctccacatcaccaaattgtgaggacttcgattttaaaaaacagaaattgaaccaggcttggaggaaaaggcaaatttatacaatgcctttgatatgaattctttttattttcttctctgtggcttgcagtttccaccagggtaaagcaggcagaggtgggaggtggggagggagagacagggggttctggctaggaagggaacgggcaaggaaactgcccactacgtgctgtcacctggtggctgctgtggccggccctcattcccaccacatcagagagaggcataataatcttaggtgattttttttaagttttcaaggtgaggatgcattttactatatgctaatttttcttaatcatatgttatggtttattatcgacagatcttttaagaacttttcctgcagtaaatatttcaaactttataaattaagtattggctgcataaagtcctgttgcctgagatttgttgcaagtttgtcctttttgagatacatcgagtggctccaagtcatttgatcatgatcgtgtccatgatatcttgatagacttttaagcgtgaatccccctgatctctgtcttgctgccttccccacaccatcccctcaactcccctcccagccacgaattatacttcctcactacccaatttcttttggtaccaggagagggccactcttgttctggcctcagggacgttgcacttgctacagctgactcttgaacagtacgggtttgaactgtgtgggtcacttacacgtggatttccttccatctctgccacccctgagatggcaagaccaacccctccccttcctcctcctcagtctactcaatgtgaagacgatgagggtgaaaacctttatgatggtccacttctacttaatgaatagtaaatatattttttctgccttaggattttcttaatatattcttttctctagcttactctactgtaagaatataacataaaatatatataacatatataatatgtgttcatcgactatcctgttggtgagccttctggtcaatagtaggctatgagtagttaagtctctggggagtaagaagttaccttggattttcaactgtaagggagtcagcgcccccagtccccacattgtttaggggcaaactgcattccatcttcttggactgctcttcccacaggtgttgcccccctcccttttcctctgtcaggtcccagagcatgggttaccaccacagagaggcctctgtggatgcctatgtaaagtggcaccatttacttcagccgagaggtgaaggctgccgtgaggcaggaccatatcactgcactcagtctgggcaacagagtgaggccctggctcaaaaataataccaataataaaaaaaagtgctaccatcctcccagctcctcactcccaggaatcactcaggagcccatggttctgtcttattttgttcatcgcacaattactatctgaaatgatctcatttatttacttattttttgtctgcctcccaccagaatgttctctgttctctgccgtatccttagcactgagcagtgcctgcacatggtgagcactcgacaaaaatttattataaggatgaatgaatggatggaccctcgattctgttattattatgttttaatccagacaacactcaggagtttcactgtatcagtatatccattaggaaggttagtaatgtgtaaaaactctcctgtgaatgctttcattcagtactcagtctgtaaggggtaaatccttcagcagactcttgaggagtgtttaccaagtgtcaggcactattctagagcagtggctctaacctagggatgattttgccttccaggggcagctgtcaatgtctaggaacatttttggttgtcagggtgggtggtaggttgctactggcatctagcggatagaggccagggaagccgctaaacatcctgccatgcacaggacagccccacaacaaagaatcatctggcacaaaatgtcaatagtgtcaatagtgtgaggttgagaaaccttgttctggagtctgaggatacggtggtgacagggcaaggctcctactcccatgaagcttatattctgttgcaggaaccgggatagatacacaataaacaaatgagattattctgggaatgacaagggctgacaaagaaagcaaatagaatgttgcgatggtagctgtgggagttacttagatcgacggattggggaaagctttctgagaggtggcatatgagctgggacccctccagatgagctggaggcaaccctggagatctggcagaccctaccaggaggagtcagacagcaagtgctaatggggaaggggaaaactttccaaaggttctgaggtttaggttggtttcaaagagggccattcactctggggcttgaatgtgcttttatccaatgaaggtagcctagacatctgtttgaaaaaccattagattagtattcttttttgcaatatctcgttttttggaaagagctaagcttcctaaaaaacgtatttttctagacttcagagttccttaagagtggtggtttatctttctgaggttggctgccatgttgattcctcctcccctttcccagaattgggagtcttacagctttgtctctccactcagtgctcagagaatcacacacacagtcccaggataggacattccaaaaaataaagaagggcacagagaaggtgggggaccttccccgcaacttagccgcagttggagattcaataattgagcctgaaagatcactttaatttcctcaataatagtttggtgttcttatgtgttaggttataaagccctaaaacgcagtataattcaataccattgtgctacaaacccactaacacttttttcttcactgcccagcctggctcctcctcttaggagtcgcatgtccatacagagtcccagagaaattctacatctttctctgtgttctcccagactgaacagaagactggaaatgtcttcccttaggtctttgctgccaatctgggaaatgtcaaaggaattagcttttctttctatacttctagcatgtatttatcctcgctataaatgtcactttttttactgcttgtgtgtcagtcaggttgcttttggctgcaagtgtcctcatgaccctaacaacaagttactgtgtcacatatcaagttctgggagagggaattccagggggaacaggaaagcgtgtcttccttgagtgaggaaccctctccaagaaccctccagcagactccgccatgcttcattggccaggggctggccagatatctctttagcagggaagatgggattggcttgggtgaattgtgatgtgcctccattgcttggggagaggtgacatccaaacaaaatctgggcactcccagcaagggagaaggagggagtgcttctgggtaggcaacgattccaactttatcatttgtcttcctggcaaggactcagaagatactgaccatttatatttttctggttcttcatcacatgcaagaatgtcttttgttataatgattagagaaatgataatgatcgtgggcctttgtttccccttgcctgagctgggccttcacaatgcacaggcattgcttttgataaattggattgacttagaggattttagacttggaaagccttaaagaacagccagttcagtctttgtctttccacacagggacactgagcccaggctgccatgtggcctgcccaggacctcaccgcttgttcagctgaggcccgcacgctttgggtgcacaggctcttactttgtgtctttttcctaatttcatgaagcctggtccccgtttgcctccagctaatcaatgctattgtacacgtttaggtctttatctcagttgaaacctgcaccagaactggagaactaagtagtagtcatatatagctcagcatgaatattagatatttcttattttaagtcttctcttgaatcatttaaagacatttcaatcacttattaacaggtatggaagttgttttgggggatgaggaccttcagtcctcttcttggtccttcagaaccacatcatctgggtggtgcctcttctgccccttcctcctcgaaggcagctctgccaccactaacagccacagaggagaagaggaaggggacttgcttcacgtgggaaggagtgtctcacctgaagcatccttggacgcttatttaatttaaaaatgtttcatgagcaacttctgagctctgttgtcctcttccccatgagcggagggtggaatgaggcttgaggataaaggaccctgggccttgagaatgcttcaagccccggagatgaagttgtctgtctgacagaggtccccaagtctgcatccaaggagaggacctctcttctctatgaagagatgctttgcttctggaaacccaagtacaatcctagaaacctaggagctggccatttgtacaccgaaagttttctttttttctgtgtgaatggaatccccatcaggatcctattaaagttctctggggaatttagaaaggtcttgatttccatgctgggggtgtagccatgcataccctgtctatagtgaaacgtacatagtattttccatgaagggaagtgcctgcaaactattcaaagtatcaggccacaggagcgaccagccaggactgagaaggtggtgtaggatgggatgtccgcctgcgatccatctccatgctgtcctgtcctcatgtccccataggaacagttatggacattggacttttccttcttacagtccccctcagttgtggtgctgttggcatttttgcagggactgttcgttgttaggggctgtctcacccactgaagggtagaccttggttaaggttaaggatccttgaaggtttaggatccttggcttttacctgcattcaattacccacccaggtattgcagcaaccagaagtcccgcaccagcttctcgccatctcccgtggagcagactgctctgggcctctgttacaggacggattaggagtcaggattctggaggtggctgcagtcctatggccaagccggtacctgtacctccagggatccgcattcttaggagggttttctgaatgtagggaaagagagcaccaggggacactgctccttcagggtcacccaccagcccctcatggcttcactcagccaagaagcacattgtatctccttggggccctctggcatctcctctgccttcatacttggtcctgggttgcatgcatttgggatatgttttcacaccagagagcttgctagacagagcccaaggggatggaactgagtgaagtgacctataggcctacttctggccaaatctcagggcccaggtccccggcacaggtctttgctgcgtgtgatttctgccccttcatgggggaccaggaggctctgcagtcttttggacattaaatgatgcttgcaaaacaacaatgtgatgagttaggaatgaatcagaagcagacgagggacatttaaaacctcttagattacagtcccaccaacagtgtaaaagtgttcctatttctccacatcctctccagcacctgttgtttcctgactttttaatgatcgccattctaactggtgtgagatggtatctcattgtggttttgatttgcatttctctgatggccagtgatgatgagcattttttcatgtgtttcttggctgcataaatgtcttcttttgagaagtgtctgttcatgtccttcgcccactttttgatggggttgtttgtttttttcttgtaaatttgtttgagttcattgtagattctggatattagccctagttcaaccattgtggaagtcagtgtggcgattcctcagggatctagacctagaaataccatttgacccagccatcccattactggatatatacccaaatgactataaatcatgttgctataaagacacatgcacacgtatgtttattgcagcattattcacaatagcaaagacttggaaccaacccaaatgtccaacaatgatagactggattaagaaaatgtggcacatatacatcatggaatactatgcagccataaaaaatgatgagttcgtgtcctttgtagggacatggatgaaattggaaatcatcattctcagtaaactatcacaagaacaaaaaactaaacactgcatattctcactcataggtgggaattgaacagtgagatcacatggacacaggaaggggaatatcacactctggggactgtggtggggttgggggaggggggagggatagcattgggagatatacctaatgctagatgatgagttagtgggtgcagcgcaccagcatggcacatgtatacatatgtaactaacctgcacaatgtgcacatgtaccctaaaactttaataaaaaaaaataaattaattaaaaaaaacaaaaacaaaaaaaaaacctcttagatactcattccctcatgctcacgttcctccccaaagaacctcctcccttcccagggagagggtcttggccacatgtgtgggaggctctgcaaagccagtgagctcttccacccacagcagtcccagggccctgacattcctccttccctttcctggttgccagactttctagaaggaagccatgtattcgggcacttctgaagggctgggtgaaactaggcaacagacttctgcacgttacactgggaaagccagtgtgtggaggtgcagcgtgacctgaaccagtcctgagaggccaggtgtccacacttggctgtggggcttggctggtgggggcagggcatgtagcctgggtacagggaggagggggactgcccagaggcactcactcttaatttggctttctcttcgggtctcattatgtgtcacttaatgtgaaaagtctgctttagactcctattctaaatcaccttaacctttcatcttgccctgtggtgctcttggctcctatagcactgaaaacaatgtgtaattctatatttatttatatgtttattatctgtcacccccagtagatggtaaactgcatgagttggggtcctgtgcattgcaagtgctggcatcttagtagctgcagaatgaataaacagtggcagtagcatcctctccggctgagtttttagagtaggaagtaggcagaaggtttggggtcatcttagtttgctcaggctcctataacaaaataccgcagtggggggactacaaagacggaaatgtatttctcacagacctggaggctgggcagccccaggatcaaggtgccagcagatttggtgtctggtgagggccttcttcctggctcgtggacatttgtctcctcactgtgtcctcatatagtggaaggggcgagggagctctctggagtctctaagagtgttaatctcattcgtgagtgctctgccccatgacctaattgcctacgaaagcccctcccccaatatcatcacactgggggctaggatttcagcataggaatttggggggacacattcagtctgtcaccatgtacatggactgtgcagtgggaattaccctgatttgaggagtgtttagggagggggagggcgagctggacagacctgggatggctccgcgtaaaccgtgtctgcagcatcctgggagcctgcttgagatccggcccttctaaggagctccaggagacttacaacccagcccttggaaggagatccagagggaagaaggccagttgatgacttatgaaatgtggatttgtattttcagaagtgcagagtagtattttaaaaaagcagatgagactctgagggttgggagaatggcagagcatgggaagtggaggctgcttcggatccgagaggaggcactgtgagatgtggaaagagcttgggctttggaatggaacctgcatttgattctagatttcaccgctgagtagttatgtagcttttggccaagtcacttatccagtctgagactcagcatttttatctgcaaaatggggctagtaacactgccctctttgagttgtcatgaatattcaatgagatgatgtgtgtacccacctccctacctactcactgtccaatgagtgtttgttctttgttccttttctctcttgaatagccagcgtggccagttttaaatttctcttgctctccaatctagtctaatttattctgtcagctgtcacatctactaactaggtagtccataggtgcatattatatgcatgtaatggacccattgttgtgtgaagggtggtgaagatttaggagcacagatttatcctgcagaccatctcccacatgaatgtgttcctgggagaatacattttggatttttaatacccatgcttcgtattttatacacatattttaataaaatgattttaagctgctgtttatataggaaattatatttacagcctccaaatgcaatataacattttagtgaaaagtcttgagttacatttcaagtacagttgatagaatgtgggaatctcttgtgggtgttgtgtagagcccgtcgagtgtcaataaaggggacttgctttggggatgtgtctgggccccaggaccacattcgaggagcatctttcccttcccaaggcaaggcatcttggctacatgtgttggaggatttgcagagccaggatttgggggatagaccaggctgctttcccgacccatgacacacctggactcttcccttccctttttctggctgacagtcttcctagaaagaggtcatttgtttggcccctccatggggctgtgtgaagtcagctgacgggcttctgcacattaagcggagaggtcaggagcacgttatattcattgtgatagtttgtgtgatagttctactatataatagacattatgctgtattttgttacttttaggaaatacatgatgaagtgttttggttacattttaggaaattggctttgagttgacatgtaatgcattataatttttcttatttaaaagatgagaaataggccaggtgcggtggctcaagcctgtaatcccagtattttgggaggctgaggtgggaggctcacttgagctcaggagttggagaccagcctgggcaacatagcaacacctcgtctctacaaaaaaaagtaaaaaaaattagtcaggtgtggtggtgtgcacctgtagtctcatttattctggaggctgacacaggatgattacttgggcccaggaagttgaggctgcagtgagctgagagttgagatcgtgccactgtattccagcttgggtgacagagccagaccctgtctcaaaaacaaaacaaacaaaaaaaaccatgagaaattggctagcgtttcccacagaacatctgactttcgggaaagtcttattgatgtgtgccttttttacaaatggtccctatcttcaaggcgtggatagtgtttttagggagacagaacaaacaataagaatggagcattcatataaggaacataacaaatagcacaaggaggtacgcagccaaattagtggacctttgaggacggcagggctggagaggatgggtagcaaccacatacgccatggctcttggaatttcagactttagcagtttctcaatgaatgttccttaagtacctgtcatgcacaggtgctgtgccaagtataaagtgataagcaaggaagcggaaaacgtagcatgatgcccagcctgaacttctctatgtctaagaggaatgagaagacattaaaaacacacagcacaacatgattcaaggtagaaaagttacaatgtgctaaaagagaagaacagctagacaacgcactgctcagagaggggagatgacgtgcacatctgagaggttgctgtggctttggctaggacagttatcttagctgagatggccttaaggcaaggtcttgatgagggctgcccatgttattaacacctggcactgcagtgcccgttagagtggatgccgccggctgagggagctggcaggctctggagccctctgtcccctaggcataaatctgctatgcagtgcattggagggaagctccagggacctaaggaaggatgtctgggtggtgggtggcatttgagggactcagggcactgatatttaccaacccatacagtgttttactgtttaatgaccagtatgttttaccatgcacagtagctgaagatcagcccaaattggaccccaggggtaggtaagctaatgaagccagaggtgtaggctatccatcctcttttgtcccaatccaggaaatgtattttacccaataacaacagtcctgtgttcttggagggtgttccacctggcgtaacctaagggtctaacttagggtttaagtaccctacattgaaataatagagaaacctgtgacctgaccactctaatgattctaatcaaagtgctccagcactgtgatccctgccccagacccctgggcctcacccccatccagtaaatagagggtttgtgcatggcaaagctgagggccgcagagccccgcgccagctctcccggccagcagcgtccatgctgatggtggtgtttgtgcagcacctggtatgaaatcttgtagctatcacccccctggttcccatgcctgccacttctatcagtaagacgcagcgagtcacacagtaccacagtgaagtcttggttttggatgaggtatgtgattataagaatttgtttttataaaaacaataatcatcctaaaaacctgtgtaagcctcccctctgcaaaccagtatggtctgaaagaaaaccaagtaaaacaaacaccaacaatccttatgaacaaaggagtgggaaggggtatgttcgacggttgtaatagtaagaaactcacggggaggagtcatagtgtgcttgaagtttggtggctctctgaagacaaatggcgctccatctgtgtgaaagggagcgagggagtgggggaggcacgcccgtggctgctctgtagctggggtgctgtttcataaggtggttcactgactggtaccaccgtcacacagcgccctattaccagttgtttacccaagaataaagaatccgaattatattttagaaatacaatttagggagctgaagtttaaaataactatcttgagcttcagaaagctcatctctggaaaatattcacagagggatatttgtacttccaagggaatctgatggggcaagaagcaagtcagatttctctacttttcagttaatggactccttaaagattatgttcgtattcctttaaaatagtaattgctttgtttcctcaagagccaagatccatccagtccctaaatcaaattctcaactaaaatcagaaggtttaagatacagttattttaagtgctgcatactcttaaaaatgtgtgtctggttatgttgtgtatataagtggctcatatcagagatgcagcaagtcaagctatataaaattcagtaacacatgccagagaaggaaggagggaagagagagagattgaaagagagaaagagatgcttatccttttctccaggagaggctcgaattttactttcaacttgtttctaaaaatggcagatgcaaagtaagaaaacaaatgtatctgttgcaggaaggaaggaaggacagagaggggaatctgatcttcagcctgatgtgatatgtttttatctgaatgcttttgcaatagaacatctgggaggcaagtgagaattggggtatgcctatgtttcaacagtttcattagggtcacagacctttatttcccagggctgtgatagaaaatatgaactcttccatagttgggagttgaggaaggggtaggctgaaacagtggcatctgtaacagtgcatgccatcagtgggatgtgatgatagtgcttatcacaatagctttaagacttatgccctctttctttggaagcatttaaatagctagccttgtttctctttcctaggaggaagcctgggattgatgttggtacctccaacctgaagtctgggaaattggtggggggtttgttgactcaagtttataagtggatttttaacccagttcacgtggtgcttgtgctgacactgacattttgtgctgcatgatctggaagttgaggcaaacattatcaatgttagactggcagaatctgagaggacagggtcccagtttcaaagtttagaaacatttcattgatcaaagtgtattagagaaaaaagcattaagttaattttttcattcagtcattcagtcatgcaacatacctttcttgatcatctgccaggaccccagcacatttctggaggctgtatttgggggcagattgaagctaggtgcagtatcatctcctctctggtaactcctttccaattgaatctgcagctataactggtattttgtgccacagagaaggaagaaagtatacaggtgggcaagctgggattatgtgtatcaagatggttatagtaatggaggaactatctcttgggatgcattttagcagaaaggaacataaagcattcaaaagagttctattctctagttagtgtcaggactgacttttctttgttctgtggtcaaggaaggccctactgaaaacccaggaatcaaggtgggtgtttgcatgaaggtcccttcagcgtcagcaatgagagcagtaaatcaggcagagctccctgaattaggagtcctcccaggcagtcaggtcaaggtcagatttaatttgggattttgtagtttacaggatgctacccactttcttacacctcacagtaaccatgttccagcagcttattggattggtccaggctgtgcctggtggtgagaacgtcaggttttgtgggcacatggcttcaccaggagaggtctggggtgtctcatgttggtagagaaggagtatgtccgtggactctaacttctctagaggcaatgccaaaggcaaactggatagctgttgctgctgtagttttgtaaatctatgaccctctgttgaggcctctttaactctagcagccttatgcatctttatgattaattcagtaggaccccaccagcagactctccttcttctaagagtgtaaagtcattcatgcaggtttggccttgcttggaggttagggcttggggggacatgagcagggcttgccctcaaattcccagtcatttggctcctcctttctttcacctgttactctttctgctgctttttttttttttttttttttgagacagagtcttgctcttttctcccaggctagagtgcaatggcatggtctcggctcactgcaacctccgccttccaggttcaagcgattctcctgcctcagcctcccgagtagctgggactccaggcgcccaccaccactcccggctaatttttttgtatttttagtagagatggggtttcaccatgttggccaggctggtcttgaactcctgacctcaggtgatccacccgcctcagcctcccaacgtgctgggattataggcatgagccaccgcgcccggcctctttctgctacctttacgttatttacacaagcttggaggcctagaggcaggagctggtatttggatcaatggctgggtaatccagagcagttaaagaaccaagaaattattaatattttgttccaggttatatgtttttatggggtgatggtgaaacaaagaatgaattttgtttcctaaatgtgtgtttcttgcactgatagcaaaattagccactgtttacatttcctgagcactcatcagcctgtggtagagagaactcaaaggtaagtgtggttgcaaggaaagaaaccgggaatccagtggttgccgctagcttcattcaatgtatagatccagattattacatattatctgaattaaacaattttactttagagagatcatgcaggttctgtgtttgaggaaatcttacggttgcttataaaggaaatcattgccccaaaattctggatttcaactaatctgatctgcttaaagcatgacacctgcatacttgctaacttattttttgagaatagagagttagatcaggaataggattcagtccttagaatgcagagcttataattttagaaaggtatgtattttatttaggccaggtatttttactgttaatatatttactgttttatctagaatgttgactctgttatgattgagtcagttgccccttccccacttcctctttcctctgtgtatttattgcacactgactaagtgtctggtgtgacagcaggtgctgcggtcatgagggtgactagttagacatggtttctgccttcatggagcttacagtctggtgggagggatggacaaaggaagcacagaactggacaccatgcattttctcctctgacatcagagccaaactggaagatcctgaaaataattctattgcatgtcccttggagatattaacacattgctcagtgatgttgattgttaaaatatcctcttgtttggaattgttatcacagtggctcctctggcggtagcatgcttataaaagcaaccaggaactgcccatgtgcccagtctaggctcctgactcccacagatgcctctggggctggggcccggctaaatattttccaggagaaaagtcagtcaggagccagcgcctgccatttcccattctttcagagccaaggagctggacgggcatctgacagcctggaagggccctgctccaatctggaactgaggttaacgcttcaggtcagctacttcctaagggaaggaaaaatccctcccagggatttttttactttgagctttctctggtgctgcttgttgctggccttcagattttggccaccactatcttcgggtactattttctctgcctcccttggagaggtgaccttccccttctgtgcagggccctgtctgtcccatgtggtcttccagggctggggtgaggaggaggcggcgagattattgcctgttacacatggacatctagacgggggaagaaacataacagctttatttttaggctttgctaattctcactcttctcctagttcgctgctacctggcaacagcttattgtcatggcaacaccgatgttaatgagtgaaactctcagtgtgtctgctctcctggtgctctgacagacaccgtgtggagctatctttctggccatcagaggctaaacgctaggcttccttcccctctgcaggcctcccaggccccgggccccgtccacagagggaaggcacggaggcagcgttgacaagggatttatggctctgcttacacattcccagcttctcctctcttcacggatgggctgctgctctcgcactgcccctcctcccgcagtccatccgtccacatttttaagcggtagctgtagcccattttctcatgtctagggcacctcaagatttgagccggtttttacagcaccttctctgcagttgatcagcagggctgaatcgcgagtttgggagaggagatttgtggctggaactggcgctcacattggggagggaagacctgcaccttcagctcttaggctgagagtcagtaacaccaccatagcttcttgtcttgcttctctgacatctgtccctcaagggtgcctttgcagcattacaataattgtgaggaagagcaggcagagtctgctccagcctccttgtgcctcagtttgtccatctctaaagcagcgcatatctgaaattggatggtccttaagttggcgctgctgaggaggggttcatgtgaagtgctctgggctcctgctcaccatttctatgatgtgggtaacttgctcgacccctctgtgactccacttctcacttgtaaataaggatagtaatagtacctacctcagagtgtcattgcaggactccaaccagatacatatgtgtccggggcttataataaaatcatggttcaataaatcttagttcttactacgtgtggtcattattcagtcttcacactgatctcgtgaactaggactattattcttgaattacaaagaaggaaactgaagcatggagaggttgagcaactgccaaggtcgctggaagcaacatgaagcctaggcgtgccctgagtcaccacactgcacattgcaaggtgagcctgaaggggatggccctgtatgccctcagtgacttctccctgctccggggaggtgggcccgggaccccaggagtgtgcctgaggaccttgcactccttggataagaggtgtcaccgccagcccccttcctgtcttccctgtaggcccagcactcattcacaggcagacacttctagttagcgcacatggttgatggacatgtgaggttcctttgaccccatcccttctagtctatgcttctgcttctttatctagaaaatgtgcagccatgtctcatccccgccaaaagaggtactcaagaagagagaagaggagtgttcagtgtcttctccccacgtcccctttcccccagcgaggcacaggggctctctctgggtttggactggagcacctcatgggtgtgaagtcgggaggagccggaggcagtgaggacctgcattgcagcgggtgtgtcggagggctcagcaaacgtgtgctgcatgagatggggaaacgaagccatgtttgccggcatatctggggttccctggtcactgagacatcagagacatgtcaatctgagtccctttgcttggatttaatctgctatttgtgggtgttctgttgcattcagtggggcttcagtcttcattttccttgtcctttgcacttcctcatcattccctttctgcgagcttgcccacttgctaggatggatcctggtcagtggatcaggtggtggtgctgagggctctgttaccctgatggcttgccagcttgcagggcccagcatgcctgtgagggcaaaagggttctgagtggggcctgttcctctgggtgggatgcgctctccctcctcctaggcttggttcctctccttcctcggggcctgattcctccagctcatgctctgtctttcctcagagctcctaccacagtccctgtcccccacaccgttaacacttttacatcagcattgcacatggacataaaggggcactgcagccagtcccctgtggaggatcaggatgtcccagcccttcagggacaggctccagggtaggcctggcagagggaaggaccatgttctctcccaaacaggccagtccttggagctgctgccatggcttcagcttccagtaccctgtttggagggctctttgcaaagaggcagaagagccccaaggtgagttgaagggccctggagccccaggcctgcctgcctggggagcagctgatggcgaatctgtgtcctagaacacgccctgctgccaccagtgtgacatcagccgtggttgtgaaatttctgacaaagatgctgggaactcatcctgttctcgaagtcaccatgccgcccatcagttgacatgctctgttgtcaagaacacaagaaccagagagaaagcacactcagcagagatgtgtcctagggtgttagaggaaggaaccccatcacaaaagaaaattagcaaagacagaactgggcaaaaccaccagaggtccctggggcacgccaattaactagctgggagtcttgggcaagagcgaggggaggccagggcttagggatgaaatgtgaggatggggaggggcctcttgagctggctcagtgcctcagtcgggcactggatatggactgggaccacatcttctggcccctcttattgtccctactgccttgaaaggactagattataattacctgaaggactgagtaggcctagaaatacttccctaactgcttactcatatcaacattccttccaagaaagaagcaggcacgcagtccacaattagagataaaaggcttcaactggaggaggtaaggccgtggagcgaatgtttcagttggaatgcaatcagtcaaacaactagggcaattgactggttatcaaaccctcctgggttttgatgggaggaaagaagaggaattactcataaggcagagttttcttaaataaagagaagggccccccagaagaagaggcttcaggacactgattcttactcttgtctgtacagtagaataatctgggcagccttttaaaaatactcaattcctctgcctcaactcagaggagttctgattcagtggccttcatagggctgggacatcagtattttttgaaagcacccccaggtgattctaataggcagccagggttgagaaccactggtttagaggtgtttaaagacagaaggcaaaatgtgtagactccagcacagaatttgctgttttccaggctgagaccaatagaaagcatatcctgattttaattcacagcggcacattctaaaagtatactccaggatttaaaaagtctaggggcttttggaaatatttgtttgcccatgttcatatcaacattatttgtaatggccaaaaagcagatgcaatccaagtattcattcgtggataaatggataaacaggatgtggtatatacatacagtggaatatcattcggccttaaaaaggaaggagatcctgatacatgctacaacatggatgaaccttgagaacattatgctaaataaaataagccagacacaaaaggagaaatatggtatgattccacttatgtgaggtacccagaatagacaaatttatagagacagaagtagaatggtggttgccaggggctggtgcagggggaagtgcggagctgttgtttaatgggttcaggatttcagattttcaggaatagcaaagtgttctggagatggatggaggtgatggttaaacaacaatgtaaatgtttttaatgctactaaattgtacacttaaaaatggttaagattgtaaaatttatgttacatgtatatattttaccacaacctaaaaaattaatttcagattaataagaatcatctattttaatatttgagaaaaacagaaatgtataaaggagaaaatttcaaaattaccacttgatatctagatgtattctttctctgcatgtgcttaatcatgcaaatacatacacacattgaatcttactttctatgatggcttgcagtctgggttttcatttgtacttgatttggtttaatccttatttcttgacagagatggttccatctcaagggtggagtaagtgaggtgacatagtaggtgggcatcctaacatatccgtatattcagctttggaatcagacactactgggttcaaatttgcacctgtcatgttcacgatcggtgtgaccttgggcctcattctgagcctaagtgtccttatttcagacttgtttgggaagttaaagataacttaggtgccaggtccctgctcaggccgtcgggaaatgggagctgtaactgcagagtcaccggagacttccacggacacttttacgtacttgagatagatattcagtctccacttctacccgtctaacttaggagagagcttcggagaagccctgatctgagattcaggaagtcgccagggctgccacatggtgctgtgaccttggcaacaccagattctttctcggtctctgttactacatttacaaagtgaacacattgggttttggggtctctgggctcctcccacgtccctactctagcatcctttgcctctccgtagcctctcactccctgagatgcagggccctcagtggatgtccagtaaatgtttattgacaacgcgtctcctgcaggttaatcatcaacaacatgcaacaatatcccagatatgaccggctccctccaaagagagaaacctgctttatggcaaactcattgacttttcttcaggaagaaaatttctgctggtgcagcaccatattctgcaggagtttggatagggtgtgctggaaagacagggatatttttccctaaaggcagtgcataggggcagaggggcaaaactcccttttttattcctgtagtgcttgtactggggcagaggaagcagatgcattaccaagagcgtggaaagaagtcctacgtccagcctagagctcagcgcatctttcagctgccaaatggaaggtctctctgtggcaatgctggggagggaaattgagttaggatggcttgttccaaataaaatgctatatttaatttcactctgggaaacatttgatgtccgggctactgtaatacgtgaaatagatttaagaagatcctttttttgttagaacaacagaaaatacaaaacagggaggttctcagatcagttgcaggttgcacgtaggggtctgatcatttcagtgtggtttttaagcatctggcagctgctggccaacggttgactagtcagtatctagcagcctgagtgtcactgtatgcgttgaatctgtctcagtagttcagcctctgaaatgcctttcaagttaagccaaggcattcggcacaggaatgggaaactgtcagtttgtaaatctgggatgtgtatttgtgtgcttgacatgtggaagggaagggttgagtatgaaccaatgctgagttagatcaacaaatatgtatctgactatatgatctaaaaatcagccaggtagagttccatctccagaactgctgtcccttttatgatggtcataagcgccatggctgctggacgcttctctccctttgtggagctctgccctggtgcatttctgggctaactggccatgcagggatttggggaaggagctcacagacctactttacttttcacattgttcctatcccttcaggcttctgcctgtttccttcttgactcctgttactttttagtgtgaggtcagaaaaagctcttctcccctcttctgccttcattcatttaccattcagaggacctcactgaagtggagagaccaacagatagggctgccaactcaaccctggaaatgctcttttcttattttacctggccatctagaaaccaagtgttttatttttttgtccatttatttaaaaaaactacagaatgaagtatttttggggactgtgccactctttcgggctgtaagtagaaaagaacaaatatatccttgtccagcttttcctgttagaccctcagaggaagaagctccagcccgtaacctgtgaggctttattccttggtgatgatgtgaattagagagaaaagctaatctttttgaatgactatgaaagtttctctgtggagcatctgaaaccctggaaacacttgctttcacgaacactgagtgcacccttatatgtggaaagaatttcagaggccaggtatcaggagaggccctgggagagtaaggaaatacaagcagccttttggcctgggatctggaggcctggagtctggaggcctggtgacctaggcagtggagggcccaggagggaggctttccttgaagagcactctatgatgttggttcagctctctgacattgaatttgtcatgagaacccaagctgctttccatgatagaaaggatttcctcctcctcagatgctgagggaaatggttctttgcatcctgcatccagaatcagcacaagacggtggaagtggtcagggaccagcatctgggctcccctgttctccaactggcagtgctgtggggtccctgggcaattgtacagaaagcatgtatatagagtcagatagatatgtgctggaatactgacacaattcaaagctccctctgctcaactcctttgagctgagcttaatccatagctctctgaacctcagtttcattatctgtaagagtgggaatgatgatactgcagagttgtgaggcctgtgcatgctaacgcatgtgatacaccagctacagtgctggctccctggtaaggctcaggcatggggaactggtacaagcattacctctgccctcccatgagacagggggtgctgatatttggtgtgaagaggtgctgacactagatgtgaaggggtgctgatactaggtgtgaaggggtgctgatactaggtgtgaaggggtgctgatactaggttgggttctcctagatcagtctgatgtaggagagccatcttcagctggagctttgggatctgtagttactgaccagtcttgactcaccattgtttgtggtgtctcttgtcttttttcacttgtttccggaaggcagctggtggtaagttttacattagttttagcttgagtattatgcttggttagcgcaatactaaaattatttcctttttcctgtgcattcatctattcaacatgtatttatcgaggatgaactatatgcgaggcactttgacaggcactgatgatgctgtgcttggcgctgagcgagagtttacattctctgtgcatatgagggcaagaagagaagagagagaaaatttaagatgtaagcaaataaatgagagagcttcatattatggtaggtgctatgaaaaagaaatcaaagagaaacaagcagagttttgtggtaacatgactgtgggtgggggttactttaagctgttggtcagggaggtcccctctgggacctggaagacaagaaggagctaggcttgcaaagaaagagaggaagagccttccgggggatggcatagcaagtacaaaggcccagaggcaggacaaccttggcatgtgtcagaaacagaagagcaaggctggcacacagtgaatgaccaggcgggtgcaggtgaactggtcaaagggttggcggtgtggggagagggagtgctagatcatgactggtagggagggtgacgtgtcttttttatttttagaataccatcattctgcctgtggattagaaaagggagttgggagggaatgagaaactggttgggaggccagttgggtaggagaatagaggctgggaccaggtgccagcagtggaggtgagatgaatggacagaatttggccagtgggatgaatgcaagtgcctgggaggcagagttgccagggcctgctgggcagttgggcaaggaggcctcaaaggatgccaggcagtttgttcagaataaacatcaacagtgaaagtcttgtcaagagtgttgggaagttggacatttttagatacagctgatggcagtgcagaagttccactcaccttggagggtcatttgacaaaatgttcaaaggcttcaaaatgctcatttcttttggttcagcaagtccataggattttatcctacagaaacagtcagaaatacacaaggattacttacaagtgtgttcattgtagtcttatttgtaatggagctaaacctgggataatttctctcctctattaatcaccagagggctgggtaactaagttaggatgcgtccatatgatggaacaccatgtagccattcaaatgataacctagaaggacagttaatggcacataaagatgttcaactgcactgctaaatgaacaaacatagaaagttatctacaatatgatcccaaattttataagatatataacctctatttacatctcatatgagtgtagacaggatatactataccctggaaggtataataggtatacattagagtgttaatgataagccaattcagggaacaaaattacaaattattttatttcattctctatttatgattcttctaaattttctaacataaacatttgaaataaaaacttaaaaaaagccctgttatttgaaaaaacttgtgatgtcttaccatgtccaagtataaactgaaaagtgaataaatcagtgggctggtggcccttcttaatacactgccatacataggacaaccatttgtattcagaaagtttgtgttgagtaagtcactggatttgagtcagaagacttggagttggagtcccagctcagccattcactggctttgtgatcttgaacacgacgcttaacctctaatgcacagactcttggctgcttcaatttgcagtgggaatgaatggtgataacaagaacaagaataatgctttcacggagttgtgaggattcagtgatagggaattagaaaatattttgtaagaggaaaaccacaatgtaaatattaatatttcagggcccaagtctttgacatggacgtgactatgggcaccaatagatttttggatggatcatttatggtaccctgtcgtgccctttagtacacctttgcctggtgtacatctcatgcaaccaaatggccagctcacgtctgatcccaagccctgaattaagtgagcaatctgaacatgagggacaatgagttgtcctgagtggcaggcggctctcaagtgaggagtgctttctcattcactggaaaactgtaagtgaaatgctgcttcagcagccacacccagagcccctttgatacatggttcagctgttctgttacataaacctattggaaatgaacctgcaaaggagttgagcagagggaggtgcccattggaataaggacaaaggagaaatgcactacctctccatttaaaggagacatttgctttttaatggaccctaaacactgggatctgaaatgtcacaatctttacatactggaatggacacgcacataaatgctgatgaacagctcagcaggcacttaatttttaaatccttgattgttcaaggacagggatatcctacttggctctgcaagactcatagcatactggacaatgttgtctgcatcggaatgtcttactggggagtcacacctccaaaaagaagctgtgtggtgaatgggtccaaacataagggtttgagcccctgttttcagctgggatttttgggtaaagggagatgaagcagccaggtctaaccaactgcagaggtttatttcttggggactcccagctccattgaggtgtagaaaatatagcacataccagttaccaacaaggatacctgttcctggatggaactgcctggttggaaagaatgctggtggtcagtagtgccttctgatcctaagaagaggaccctaacctggccattttgaataagggccccatagctgctgattaagtgtgtcaatagtgggttccttgtgatgtaacattcatcgtccttcctgtggtggatgaccctacagacccacctgctgataagctaagctgcttgcttaaggccataaagctacagaggtattaatctagagtttgaatcggatctctctgactctaagactcctgctctgaagtcctccattatccttcctcttatagagttgttttgccagtgctattggatttgaattcaattgtaccctacgtacattagaatgaaaatgttatacatcgtagaaaatgaataaatcatggttccatccctcaagaaacttatatgtattattatttaagagtttgaagtgcatagcaagagctcaataaataattattgagtaaatgataatacacaaatatattctagtttatttatagatatccataaccccaatcagattatgatgcatctcataaaaggtgcacacacaaaatcccatcggagtttaaagacgggagagaatacctctggagaaatcaggaaaataaaagttggatgtatcatttgagatgggtcttaaagacctgtaaacactctgacaggtagagatggtgaggcttggttcccaccctgaacctcctgcctgctgattggttcctgcagtagaccctaggtgccctggtttgtttctgctttgtaattccacttcttaatgatatcaacaactgggagctgggaaatgaagtttttattctgataaacctgacttgccacaagaggcctacaagagaaagtatgatttctggtctcctctccaccgtctccgatatgcaaacgagtcacacatctgtatcttcattctagagctctcttttgaactgctaatccccctggcggagcctctgatcctggttatccagcattcttctagatttaaggttgaaacatgatttaaggtcatgaatgcatgaccttcccagactcccttgtacatgagctcccacattcccagcccctgttctgctccaccccttgtggtgatagccagggtggtcagctgcattgcatgttagtagtaagggaagaatggggtggtgggtccagagttgtgtgttataagatgactttggaggtcaggctgttgttttggctcactttgggattttggggagtagcttactttgccatcaatttcctgatgaagaaaaggcaacttagcattcttcgtataagtaaacaggtcagtgttggagataattacatcatgaagcaccgtgggtcccagaggtgggaggcctcatgtaagtactactgtgctattgccatcattgtctggaggggatgataatgtcgtatttgcttgcaaaatggttttctgatgttgggttgaaagagacggttatgtaccttagccaactgttagggctgtttttcttctagcacaatttataaagtgatttttgtcacacccaaatttttgcaggaccgcagaactcagacatttaaggttgtggcttttcagaatggatgaataaacgttcgcactctaaacttaagagtgtgaaggcttgtcaaggctccatttctggtttgctttctgatctcatgcaagtcacttcacctctctgctttttgtttttccatctgtgagacattgctcactttgccaggatatcttcaatatgaagaagataatgtgtggaacgctgtcagctgctgcatcattaaaaagcatttattcagcacttatgtagcattgcacaaagagaattataaagactagatccctgccttgtctgctaggttatattctaatatcttcttaaaaaggcagaaactaggcaactaaagagagcaataattcaaatgttatcttttaagctacacaaataacagtagcataaataattaacaagcaccaatacgcaaagaaatcagttatcaagaatacacagaaatagttatcaaaaatacatagataaaattatcagaaatttctcaactttctggagccaagtcatgcaagaacctggttttatgtaaatgaaattgcgatactgccccctggaacctgagcaagaagaagatcctagtgggcggagtggggagggaaagtgttctggagagttttacttgggattctggtatttgggtttctgtcactgtctcttctccctccaaagtcaactaatactcagacattaaggcttaagaccctgttaaggggaaaggtctatgctttagagaggatgctgtagagtggtaggcaaccatcattcctcttgtgaatattgtggtcattgcattatgggccttcattgaattatgaaccatcatgaggatgagatccaaaccaagctggatggaaaccacatggatgaggccccagagagtgaggacgccatacaaatgtaatcactgagctgtctgaatcatcttgagaaaattctacaagtctgtatacatctgacttccccatcagttacacactttgaaaggaaagctctagggagaagagtaccatttgcttccccaatgctaggagaggaaggtgatgagaccgagattactaactaaattatttcctgtgacttcttagaaaagctgaactcccaaggtatgccgcttggatatggggacgcgcacacacacacacacacacacacacacacacacacacacacacacacagttttcttcatacaggggtagtaaaacctgtcaggaaattaattaaattagctattatttgtgtttctcttatagtttacagcatcctttcactgatttgatctcatttgacataaaaagactagctgtcaaggtaggtgagactaagattaatcatccccattgtacataaaaggaaaccaagactcagaggttaaataacttggccaaggtcacacaaccagtgtgaatctggcagagaccagatttagatattcactgtaataccctgactttctctctggaagatggtcagcagtctaaagccaatgtatttaaataccacctatcacaaattttgcatacaaagatttcaagccccatctagatacctagttttcctctccatatctcatgtttttaaattactattttgtgtcaccatagtgcacagcatgcttaagacctggcttgctgctcttaataattacatagtgtcattgtttcctccacggagactcacagtggaagctagcaagccaggaacttgtccttcactgcacttgggtcttaaacagctacaaaatacaccgagtttgactcccatctccctccagttctcgagctctctgcctgttggttttcagcacgagtttcaagtattctttcggcaggagaagggctcttgaaaaatagcccatcacagtgcaaattcttttctaatgaatgcgctgggcaggcaataaatctgaaagggatgcatctgaatcccggtccaggtggaagatgctaaactggcctaaggttttcaaatatgcctgtccttagcccacttgcagatattgctgccgttactgctgatgccatggcctgtgtggggaggcagtcctcaccaagaactccctccacaactgctgggtgatggggggattgctgcatgctttctctgttccctgccctcccctttttagctattcccctcctctctgaaatcatcccctcctgactttagtccaggatctccttccagctcctcgccttcctctaaccaggaccaactttctggaaaaatggttcttgcacttcagtgtcaattttccccaagaacatgagcatttcaagctttgagtgctgattcgggaatttatccagtcacaggagtttcccagacagacacttcattctgttgattcagagtcatagtgactctgtgatcagagggacttgagtttgaatctctataccacctttgactgacttttggcaagttacctaacctttcagagtctgccaaatgaagacaatgctattgtcctgttagaaggattaaatgatatcacataaagtacctggatgtgctcagcctgtggtgaatcattatatgtcagttccgtttttctgtttctctcctgaagaactcacaaagcctctttatctgttcaaggtcattggatgacttgctaagaactaggcagaagccaaaggtcattctcccatcagttatcactcctacttgacaatacaccccaggtgtcaattagtttttggtttgacctactatattttactgattctactgatcctaagacatgttttcccctacattttcatttctctaaaactaaagtgcaatctaaactaataggttacactttagttggcaccattttttctttctcattgatacataaaataatgggcacatcttacaacttacaactttgacttgatggacatatggtaattatttttaaacacctgactttaaattccctgaactcaaatggcaaacaactgccctgacctggtgattcttgatgcagtctcttcccaggtgccttgtgctggagcgtctgcaagatgtccttaggtggtgggctgccatctggataaaggggcagcaggaagaagagtttctgggcttctgggacacatgtgaatagagtgcaaatgacacttagggttgcattcttgtgtcagagttcagttggcttgtgcaaccccgcccctgtgtttggccccgagatgttttcccacaccttacacagggaactccctatcatgtaatattcaaagtgggcttttcaaccaacatttattgagtgcatactgtgtattaggccctgttaagcacttgacacgtgtatactcttttaattaatatgattactccataaagtaggtacttctttatcttacacaaacccaggcttaggaattaacttacttgcccaggtcttaaactcagatctgtctggctccaaatgtcctgatctgaatctctctgtccttctgcttctctccaagcctgagttggcaactctgccttacctagtggcaatgacaaaacagcataggagttaagcctgagttttcgttctcctaagaatctggttgacaaggtatgtgctaaagaggtaggggtagcttatagagtttgtagaaaaggggggatggagaggaggaaaacccagtacagattttgagcctttctgagtgaatattcagctccttttctccaggtacactcattccatcatttcatctctggcactgtgccagcatggttccagggccaggggtgactctggctacctggcatgaacagtgccccacttttcccatctgtgactttttctgtcttctgccttgaatcagatatgccccaggtgccagggaaagaggagtatgtgcttgatggtctgtcaagtcaggtagaaagaaaattaacatctctaacagtgagtgattgagatggagtattttccaggagctagaatattatgtgtgtgtgtgtgcatatctcctggaaaaacagagaggaggagacgctcctgtagcctcaagagagctcagtttggtagtgaagacagcagatgtatgggcccattactattagcggggcaagttcttaggggtgtgagaaccaagagaacggttgattggtggaaagagcacaggatttggagttctgaagagcacgttgagctttgtcttttccttgctggctcacttgggcaagttccttaaactccaagctttagtttcagttttataatgtgggtagtccatttttacctcggcctcattgaaagaattaattagacactcagagtgcaggcttgatacaggcctcttccagggcctgggatgtattaattgctggtgctccctcagtggcagccttgatatgcacacctaggaatatatacatatgcgtttgtatatgtgtgtatgggttttaaaagtccgtccttcattcatcaaatatttatcgtgtatctgttctaggtgtcagggagttagcaataaataaaacaggcctgaatccctgcccacggggagcttacaatctagtagagagacaatgaataaaataagttaaacacactttgttgggtggcagtaggggctgtggagaaaggtaaagcaggggaatggggtgtgagtggaggtttacttttaaataagacgatgagggaaggcctccgcaggggatgcctgagcaccatctatgggaatgagggggtcagcagggtagactgacattcgagaggaacgcattccaggcagagggaattgcagttacagacactgacagacgaacggcctggcaggctcaagggcgagggagcggcatgagcagggtgggcgctggttgcaggtgaggggtcccgaggcgggcggagcagggcgttgcaggccacggtgagcacggcagcttttgcccggaaggaggccagagccattgcagattttgagcgggtgtggcgtggtctgacgcgggctatcccaggtgagcatggctgctgtatgggaggtgacgaggggtctgtcctgtgtgcgcgcccgcctggctccgcagtagctctgagaactgccttaagctccggcagcgattccctcaggttagaggcggaaggggaagaaggggcctggagaggtgtggttctcgtggtggcgcggccctcgctgactgtgctcaggatgtcccctcccggggctgcgacctggagccgcgggcaggcagtgaggggctgctgccgagctccgcagcccggggggcgggcctggcgcgtctagctcgcggtcagaggtcgggaagggcgccatgggtgtacgtggggacggcgccgggctgcggctgagccgccagggcctgctgagggcaagcggggcctctcgccttggtggcgcgcaaggtgccttgtgaggagcaatggcggtcccggaaggggaggcggggccgagcctggaagcacagtcagccctctgccggcgaggaactctcagtgcgacccctcaggaagagactgagaacttaaaagctgagggtagaacctgagtgtccaaaaggctaagaggagaacagaagggaatgctggctgaggttacacagcacccatcgtgaccctcgacggcctcagtagctggccgtccccgccctgctgaccgggctcttcccgcgcctgatcactaacggtgggaggcctgggccttctggagaaaagaggctagaatcttccatcttgggttgtgcgggactttattccactgtcagtcacaaagccataaatacatttctccaagacaagaaaagagtaacagcagctaacccttctccggtgcttattttgcacaaggtcctgttctgagtgcttggtttgtactaactcctttaatcttaaagaatgatctggtgaggtgggtcgtattattatcccgattttgcagaggaggaaaccaaagaaggacttggcccaaagacccttgctaacaggtgttgggacattatccaaacgcatgcttctgactttgtcaatctcttaatttcttatttgccacgcggactattgggagggagtttttggaaataacatatacagatacgcacaaaggtcagaaagggaaaataaaaaccggcttaagcccctttcttcccatatccatgtgagcacctgccaggcagctggtgactggcaattttcacttcttattttatgttataatttattgatgtatatgtcatccctcttcctaaggctggagactcatgaggccagagtccatgtgcaatccatttttatattcaccatagtatctaagccagtgcttttaacataataggtgctcagtaaatactaaatcatttctaacgttaaatggatgcatgtggtaaccagctctcacttaagccattccgttctgaaaacaatgagaatgagaacctttaaatatgtgaatcataacacagttacagctgcataatgtttttatggttttcaaaatgcttccgcacagtttatcttgtttcgtcttcctgctaacccttttgagagtgggaggcacgcattacttaattataagaaaatgagaaaactgaaggcagagacaacaaatgagctatccaagatcacaaatgggttttgtttctgtttctgattttgtttttaaaatcagagcggagatcagaaccatcatctcctggtcttcctattttgcaagcagcgcccggtacacacctgttggatacacagcttgaacacaggacctaattgttcgctaggcatgaacaacagggtgttttgactcctgcaagctgctaacagtcttgcacagtgctagactgtgcactagcactatctagaatgtgatcctttgaccggtaggcaggttatcacttaccagtttttggcaagatcaggagcttgtgacagaatgtaaatcagctgtgtctataaacacactgcttagtttgtctttttatttttttttacattttattttgaaataattttaggcttaaagtagaagaatagtgtagagttcccataaaccctttgggaacttcctctaatgttaatatcttgcatgaccataatatagtgattaaaactgagaaactgacatgggtataatacttttaacaaacttcagacttcattttgatcttacgagtttctccacttcagtcctttttttctggtgcagatccaatccaagatcccacatgacatttagtcatcgtgtctcctttgtctcatccaagtggtggtagttctcagtctttccttgtttttttttttttttttttttttttgtttgtttgtttgtttgtttttaatgactttgacacttttgaagaatccgggtcagttatcatgtagaatgtctcttaatctgggtttgtctgatgtttactcatgattagatggagggtatgcatttgttgcatactaaatgcatacttctgaatatcacagaagtgatgttcccttcacaatgtgtcctatcaaagggtaaaggatgttgatgtctttctactggtgctgttaaccttcatcacttggtgaaggtggtgtcttttgagtttcttcactataaagctgctatttccccacttctaataagtatcctgggggagatattttgagactatgcaaatatcatgctttttgtcaagcttttgcccatagttttagcattccctggtacatcttgtttacaacagttattatgtttggctaattatgatttttctattgtcctttttgcctccatatttattaactagacttctcccattaaggaaaaactgtcccttcttccccagttatttatttatttagtcattaatttataccagtatcatgtttatttattttattctatgagtaataatccactactactgttaatttattttcttgctcaaattgttttagctttggccattgggagcgctttctggttggcttctgtgcctcttgacatacccccaacctttctcaagtgttttcttgctttgggaccacaagatattccaggcacatcttttatttccccctcagccctagaatcaactgttactccaaggagtactgattcgttttattggagagtggtagtatgtgaaaaccaagacctgggcactaggtgtgctcattcctatcagcttgtgtttatatggagactctcctgatgaaggaagtagtgtgttgattcacattttggtgctagcttcctatctcatcatatcaggaccagttcgtgactctcccactttgagtctcagtgatctttaagttctgttgtgtcaccgtgtccatgtgactcatctgggggtaatttcaaattctattgaattaaagttatgaatcagtgttatcctttcactcattcattaagtcaatatgtcttgcatgtacactgtgtgttgggccttgtgataggcactgggtttacattagtgagtaaaattctgcctttaacaagtttatactatagtttctttgatggcgtctaggagacattactccttttcttggttctgtatattatcagaactcatctcagattgttcagcattctaaaatcatgtaagttcagcctagggaattttaaattttgattttagattcagaggttgttggaatatgaagataccattccctgtcccagtagctcctggggccattaaaaacctttgcccatgccttgtttctgatacatagatggttgacttcttcagatgcaaggaggctgaagatatatactttgacttgataagacctctgaagtcttagctgctccctctaaccaatactctctggtcagtgcttccctctcctatggggttggggtataggggaggcatcctcctcttcaaaccactctcagaccccaaaaggatcccttcagcaaagattctcttgcttgactttcctccacctacaagtcaagttggatctgggttcagcttcaagggggtcgaaagtgaggtcagttaaggtcatttggatgggcatgatccttactcccaggtccacccttcccacttgatttaatacaatctggcattattccaacacttctccctttggctgtttattagcatttcctttaactttttgagcataaatggaataagaatcactttcacggcccagaaaggtgtctccagcaaggagtgttctgctggacgatgcagccttttcaaacgagtcagttagctggaagtgtcccgtgtctccttttcttttggaaaagatgggagtgctgaaaactcatgctgaggctggttctctgtttctattggttcctttctggcatgtgttaaattatgtcttttgtgttctgaacaaatatgtgttctcagcatgcaaaatatgcacacaatggctgaccgattgcctgttcttgagaggaagggaacactcaagctgtggtgagttgattgccaggcactctgtggtcaaaaatgtgagggcaccatgggtcacctgcatgtgccttgaaaagtaatgtagggtctaggcacctgagcatctgttcgtcaggtgtgccgaagatactgccagagatgggctcctgtatgcaggctcctcaacagcctggagcgttcgccccagctttgagcctggtgtagggccaggggccagattgtggaaatgagtctttagtgcctccctccatttttatgttggtgtttttcacaaaaattttctgtgtgtgtgtgtgtattttaatatatgaaatccggtttagagaacagcctcgtatgtcccatcctgcttgtaatgcagtgatctgcccttgagaattttaaattagctgacctacatagcttaactatttcaattaaaagtaacaggcagtatagattggcaagaggtggaggagagggaggggaagatccctcccaggagctttggttcagacaaaacaatagaagtgacgagcgattctgggaagaaggcatgactgatagttgtcatggaagctctgacaccctttccatgggtgaggttctcacaaaggtggcttctggatatccgcctgctatgaacacatagcctttgtgggatggtgccaagcaaactctcttcaagggaaggattcaggcagcattattccttgctcttctgcacatccgctcttccatttccagtgtctctatacgtggctctctgagggccagtgttctcccagccccttcggcctgctcccgggggaatacctggagagtaaacactgtctgtggtacaggggggccattcttcctccctttccatttcttctctactgttcagaattctgattccacagaaatgcctaattaactcagttgctctgcaatgacaagctaacatctggagctaccaagtcaggaaagccattcagccggggtccaacacagattttctcccctctgcacccagctcagctgctgggcactgcaccaaccctgatgtggcaggacgaggatgccaagggctggagcaacccaaggctaattttttttcacccagaaaatcatgggttagatatttttaaattgctggcttattttgcagcatttttattatttctggtagatgaggagatcttgccatcactaggggtccatctctcccacatgctgccttgcagtgcttctctacgtagaccatctctgggtgatgccggtttacccagggatgggatggggtgcagtgtattacgcttcaggttgtatttgtggcccccttgggaatcagttgcaaagcagggccgtgtctgatgtgatggccaggacaaaggtctgaatgactaacaaagaagctgtctctggcaggcaggtaggagcagtccggtgcaccagagctgtggaatgactcccaggttccatttttcacttccactttgcatccatcctcccatctgcctgcccactgtgtacagtgcttactacatgccttacctagtctaagtgctttacataaatgaattcatttgacgttcacaggacatcacagataggcattaccattgtccctgttttataaatgagaatactgaatcattgaaaggttaataattttgcttatggacatttgcttctggagctggaccaggcagtttggcttcagagtccacttggctctatcaaagtcttgctatcaattacataagttccattccatctcagcccgaagtgttttcagagccggagacctcacagtgtctctcaggacagtacctttcaggtttgaatgtgcccaagagccatctggggatcctggtaaaatgcacatcctgattcagcaggttcgggttggggcctgagaatctcaggtccagcaagctcccaggtaatgtcagtgtgactgattgctggtccacacattgagcagcagtgctgtagtagactactatcatgcctgtgtactaatttcactgtcagattggagttaactgcatttggatagggagctctttcagcaatagaataataccagtaagaatttttaatgagtgatcaactatagtagcagttagtaatcaattttttgtttaaaaactaagtttcctaggactctaatggaaaatggaaaggttatgtccccctttttcgtatctttgccaagggtctttcctttgttgctgggtttaacttggcacttctaggctactttagtcctaacttttctcagttaccattatatgcagttctcccagccacaccccagcagtgtgcaagggatcagacacaaggttgaatccatcacaaaagcagaatcaccatggcaactgcatcctttgattcttgagtgtgcccagcaacctgagcagaggcgatagttgaagtgaaccaagttctcctgagaaatggaggggagtggtgccgggcccacactaggctgtggtatcttcctccctacagtgaggggcttctgtttactctgaagactccagacactcaaaatctcctcccctccctccagtcctgcagttagcctccaggggtttctggtcctaaacttccaccaccatgagattactacaatgccttgtgatactcttgttcttctggtttgagttttggtagataagcacatctgagtcttgctgtgttaatgtgtctgtattttggtgtatctgcttgcttgtcgtgtggggcatatgccaagtccagtagtggatgggctggggaagaccagaccttatcacatggtgcccttggggggaaatcttaattccaatgtgtgaaaccagtgaaagtatgattttctgggtcaattttaaaaatatacgttcaagcaaaaagcaacctgttatctcttctctttctgcctctgcacacagcagcctccattgcctagggtatgatagtgtgggttcactttgtccatctcatttggatgacatcagcgaagatgcattctgtatctctccactgaggcctgtgacaggacctaatgttttgtggagctgagagaaaataaaccaaaatgacccaatggaatataaatgctgatttctgttcctgttgtttgacagaaaggaagtaatgaactaagatgcagtagcctggccacgtgatgtcttgacaggcagctttcagatttggagatgcttcagagtgttgtattgagtctctgggaagaccctaagcactcaattcctagtggtcaatggttggcctgttttgagacataaccagttggaaggaaggatgggcctttctgctccctatgatgttgccttaaaaagacatttcctgggaagaactgggcagatggtggctttaatctcactagccttgttcttcatttttatatccaagcttcaaaaaaccagcattagccaacagcactgtttttactgctaagcaaaacttcaggaaagagcatccttcgatagaacattaattaacaaatgtgccgtcagtccaaatgaagacctgtgctgctccctctgccctccctagctccacctttatttacgtacccaaaacatttccagtggtatcaaggcgacaatgataggttttagtattgaagacctaacattaataaatgcagttttgattgctgttcctatctgtatgttctttaaggaggtttgtttaaaagccaaacaatcccacgggtggcagagactctttgttctagccttcgtcgtcaaaacagacagaatcaggtttgggagcaaggcttctacacaggagcctggaaaactattatgcagaagaagcattttttgttcccctgagtaaccaatatagttagtaggcatgatatgtgtataaactgggatgtatctcctgtgatggagtgacgaggtaactaggtgactttggcatgaccttcccacggaaataacggtgctggaccatatatagacaaagataagctttcacttaatatagaaagaactgaagtgtggccaaaaactgtctcctcacccttgccttcaatgtgatttctgagctgcagactcggaagtttctcacattccttgagatagtggtgaacagtaaaaggtttgggaattggggaactgctataggaactccaccaaaatcatgttgaatcttacagagaaatgggatgagtctgtcagtctgactttcttgtgaatgagaatggtcaggtagctctgacaggcctcaaagaaataggctttggaactgacctaccaagtgccctctgagaagaggactagccattctctgggagcagagggaacctggatgatgtggttctttgtccaaggagagtgtcctggaaaggtgttccccatctaggtattttctctgagaagcagaggatgagggctgaacttgcaggaagccgagaggaggaagtaaagtcaggagaaaatctgcctggttaaggctgaaatttggggactcatgatccagagaggttctgtaatgcctaaccctggttttggaggccagggattttcattttgactggcttcactccttggcttattaaatgtctttgactgagtggctaaaccaccctaagccttagtttccttacctgtaaagtgggaataacacttgtttcagaaggtggttaagaggattacatgacataacacatatgaaccatttagctagcgtcatgcctgtcacatggtagctcgtgaaattttagcagctatttttactcctagttttactacaataacctgactgggaaagcgtccgtgggcagggcaaaagggaggagccgtgaagataatcaggaggtcagcgttagagtgggtaccaaaacagccagagaactgtttgggagaagttgcctccagagcactccggtttggtcccctccatcagggcccactggtcatcgggtaccgtgtcagtcacctgaatgacggtgagggctgggccaataccagctctcccaggcggtgaggctttccttccacacacacaggcttcatctcgtaaggctcttggtgggagacacagctggggcactgctggaggaagggtcagctgcacagacctcgcggccctctgcccagtccctgacgtcaaaagggccgttcattcccagggctgctctctccacccagctgctgggtctcagctcttttcctgggaagcccggcgcttcccgggtaggagattctatcccgacagtctgttctagctcccttccctgtttgtgactgtccctcttccctcccactcgcctcccacgctgtcccccacccctgcctggtttccaattttagcggtgttaccagggcaggttttcaggaagcctgctccagtggctctctcctgggccatttccacagaggctgtgtgcccggctaccattccctaaggctcagccattgcgcccatctgttccccgggctgcagccagcgagcatctgcggggggcggtgaaggctgaggatgcccagacaaggggcagggagggctggcccacgtgatggccaggggagtgggatgcccaagggaaatgtcataaagggtccactggttgggaaaaaatggaaaatggaaataaggttaaaattgaaatgtttttaaaaagtgatttgtgaagacttaaacaaatttctttcaaactgctttattactcatagaaattgtatcaatcaacagtgatcgctaaattgctggatcagtcagaaaatattgttgctgctgaagaatcaatgctaattggatcattagggcattattacatgaaacacaaatagctcaggatggtcgctctttgcttggcttgatctgtagtcttcagagaagcagagaaacctcgattgtttcctgctcagctgacatgcagtttcccctcccttgctccccttcttgctggagttaaaggtggatgctggttgcagacatttccccctatttagaaaaacaaagacgtaccatggtccttgaaatcagtgatattgaacagtcctaaaaagtagagaggttaaaaagggatttggattgcattttagcaatcttctgttggggtctgtgatgtgtgaagacacatctgcacctttactgaggcaggtagaatccaacaaaagccactgatagggctccaggcatggggcagggcctgcactgagggttatggtgacagcggcctgagccacaagctggctggaaggactcctggaggggtgagacatttcataagatctgggaggccagcgtcagcgttgggcacaccatcccccagagtgcctgatattggtgaccttgctgcatggcggatgctaatgggtattgactgaagggacaaggtgccttctccacccatgcttggtcattagcacatggttaggtgggcacgcgtggcctcctcttccacctctcttttggccattttccttgccctctcccccaccccctgacctctggcagcccagagctcccctcagcagtgctcacccaactccctcagggcctgaatttccagggtgagagtcccctctctacaccgtctcagtgggtgcttctgccagggtgggatctcgccagggattatgcttgcatcttaacaggaatttactggggatggaagtattaacccaaatggagttaccacagaggggatttcacatgtttctcaaataatgccagagtgagccaaggtttacataaccagtacgaggtgaggggggtgggaagagggcaagcatttccttgcgaggctcctggcagctttatttctgacttgcgagtggttcaagaagcctccatcctcccacgcatggagaagaccagcattgactgcagccccgctatgtccccgcgctggcctggctgtgtattgtcacatagatgatgtcatggcagccttagagaaattctctgaggcaaatcatattgtccccatttttaaagatgagaaaccagaagccaaggatcctgtaatttgcccaaggtcacgtgaaagagctggagttcaagtcatcccaattccagatctttttatcatgccatgttttttatgcctccccccttgtcccagagtgtggcaagcagaggagagcacgcgtgtgggatgggatcaattgcaaaacgtgtgcagcctggccaagcaggtgggggagtggcaggaccagctatgtgtattctcatgctcaagttcctctgggtcttccgaagacagatggggcaggtagttccagctgctttgtgccttcaccagctgagcactggcaggtggggcatttttaacctcacgccttgactatcccctctccctgtcacagtcagctctgcctattgtcctccgtggctcagaagcagctatccttaatcattcatgggggaattttgtggaaagatccctcccaatgtggctgcatctgccataaagtggagattttttgttatgtttgatcccctgctgtattcccagagaactcagtgtgcctggcacgcagtgggtccgcagtaaatttttgaatgaatgagttcgcaaggcgtttctcctggttcttgcccatcagaatttccatttctcctgctccctgggctggcactaccatgcatggtgcccttgtccctgccatcgccatcatcattcaagctccctgctccatcttgcagcctcatttcttagctgtaaagtcttcccagtcctccattgtccttgtgccctctgcatagcccctcctcccagtcaggccgcatcctccgacctggcctcccacctccacgctcagttttcccagccatactttgctcttgctacattcctgccaccctatctcctgggagtctctttgtccttcaggtcagacaatgcaaacttaaatcttgctgaaataagcaagaaaggtacacaggtgcaggaggagtcttcactttcccgcagaaacatactcacttccattgctacacagagacagcaatgcaaggataatgaaaactagctactgacacttggcctccgtgctggaggaacaatgggggaccagggtaactgtgatgaactgaaatgacaggtgtttcctaaaggtggcggccacagcagacggtcatcactgaggaagtctgtgcccgctgttatgagctcttctgacttttcaaggcaaaaatttggattttgtatgaaacctactgtttcttaaatgatgactcaaaaaaatttattcttaatcaactatgtcagtggcctgttggcctctacttcagggagtcttcctagattattgaggcccaaccggattctttacttcctacctgctcctagttagtgaagcatcgtcatggagaggacagacctctggccaaagaacctaaagacttgggccctggtcccgggtctgcttccagcctcagtttccttgtttgtaaatgagagcaataatatttggcttgtccaataatctaccatggtacagctgtgtggcttgtagtttcaaagtgctttcatatgcgtgatttcatttgatcctcaaaagaaccctgtgtggttagcaggggcaagtgtggttattcttaatttaagaggaaagaactgagggtctgagaggtgaagtgacttacccacgatcatagggtttataattggtagagctggctgtgtcatttgggtcttttatctgctgtgtggtttggtgttttgtttgaacttttggatagaatgagatctgtctttgtaagctgttaagtgctatgtgggtgcataagaaggagtaaggagcttacttatatgggttattactaataagtgtatgccctccatttcctcatagtgtggcactcatccatacaccatggtaattgagctctgacgatttgatatgtcatgatcttacctctctaaccaggttgtgtgtgagtacctggaagcagggatgaagtctagtgcagagaggcccatagaatcatttggtaagtaattgctgatgaattgaatcataggaaagtggagatgccacctgagagagaaccataacttgaaaccaaagctgggctgtgcctgaggttagtcaggggcctggtggctcatagtcctaaaccctcagctcatggtctgctggtagccactgatcaaacatgcatgatagcacgtgtgactgctgccatcagtgcgatcaccatccaagaagaccacatggggggatgatgagaaggtatgaaatgacatagtggaaatggcattttggagtcagatctgggtttgactaatccctggctgtggggcaacttaactctgttgagccttagtttctttacctatataatgggataatagtagctacctcatgagtctgtccctggaacaggccaggtgctcaagtgcaatgtgtagtccagttataaattgctttgttagagcagtactcacaagggcactgtttatctggttttgccaatgctgggcactgaattcctcgctgcaattgtcagatgaggttcagtcaatacaaatattcctttataacagtactggtaggagccttttaacttgaggttttattaagataataaagacaactggagaatgactaggtgcacataagggaaatggtgctgttttcaattaaacttcaggccaactatgtacaactatggatatagaactgagttatgatgtggaattccagtttctctccactgaggacctgggtgaactgttaccagagagaagcatctctggagagctcccttaagcatcctgcccactctgtggggccatcccctgctgctcttggctcagattcatctatctgtttcagggcctttgccctcctgagtctgtagttagccacttgctccaagagtctttcagctacagccttcattaatttcattgtgaaggggccttcggctcccctagcatgcgttgtgggacgtcagctgcctgctgtgctcattaccactagcccaggaatgcggtgttgactcatggctgcagctccgcttttgaacagaagcactcagggcctgagcctgtatttatcactaggcagggaaggtcctaagggaaggtgccaggtgaacacagacctcatccttccatcattacctatgcaaaacactaaatacagtcatctcctccggaaactgccccccaggtcccagcagtagttcaggattcccctgttaaccatgttgtgcccactacctttcaggctgcacacacttccctctgtgtttagagagaagggaatgcagaagtctgccgtgtagggcatgaggggtgaagccacaggtcagtcctataagcacctcctccttcctagagcagagccatcacctgctttgggctgtgccaaggctcttgttgagcagttcagtgcctcacgtggactccccctgcaagaattcactgaggattattggttaatgctgataaagcacttgggctgtaaatatcaagtttaatgttaataaacagggggattaggttcatttatgtaaaagggaatgcttcacaatggatactgggcaggggaagactttacttttatcaacaaaaaacaaacagagtaaactgtaaacccagacccatcgaagccaaggccttcttgtctgctcaccctgacattcccacagggtttttctctggggctgtaaatgcaattctgctgctgaactgattgcctgaacgtacttgtgtgcttgatgtctttcaaaaagaaagtgtctaggaaagtgcaaaagaggagcaggcaagacagaaacagcatggccatgtggaggggccgcgctgatcgtgagagcaaagggaattgtattattctttgggatttgcatactttaagaaggtggttcaattaatggcattctgttcctcctagttgaagacagcaaaatggaagcataaggatttgctgagtcctccctccaggaagcttcttagctgagccattctcagctccattctccattgagaacccttcagcacatgcatgcttgcttagccacccgggtttaaattttcattgactgaacagtaaaggggagaagcaaacacacatgagatctctgagcagtgtgtttcaggtgctttataataaacctctccttgccgggagagtgtcatcccatttcacagaccaggcaactgaggctcagagcgggtggtctagaatgtgcccatgcttgggctcctttccttgttcctcccaaaggcagcagttatactatttcctttgtgtaaaaatatttatctttatgaccccagaacacctagtacagatccatagccatttctctgtaattctgaaatccccaagtctctgaaaagtgaaagttcatttattatccctttgacagcaaaatctggcctttcctgaattcatctggggcagagttgtcctaaactgacacaagggtagttgcagtcttatttaacctgcttagagtgaatattcatatgatttactgcagaaatacgttggcttctggggcccttcaccctgctgtgctattacatacagtagatatgcaaatgactttacctgacacattctgaattctgaaatgcatttggccccaagggtttccaataagggaccgtggagctctagaaggccctgcacacagtgagcactacctgcatgttgttgcttagttggagtgaaacctcagtaccctaactttgtgcgtggtacacccatggtgggatggacatagaaccaggccccctgttcagagtcaccacaaagcacctgccgttagggtggcaggaggaagggcaagcaaacagagcaagagaagatggtgccggcagcaaacagcacagggcatggcgtggggacagttaaggtgaacagtgcccacagtcagtgctgtggcaggacaactgcagtggggcaggctcggcagagctgggcaggggatgcagatgctggagaccttgctgcccagcagatgagagtggacccaattctgtagatcgggggccgaggctgaattctgagcaggaaagtaatctgctgaataggaggctgtagtaaggccttttagatggtggctcccggagtgaacaggatcctgaatctcaggctttccttatcccactgagccatgcctccctgcctgaaacgtgtttctgagtaatagcagctaacacttacacagtgcttcctgtgtaataggcactcctgtaactgctggacccatgacgactctgtgcaattcataccgttgttgtcccctttgtatagatgagaaaactgaggcacaccgagggtaggtcgtcaggtcccgtgagtcgcgagtgtgggggctgtggtgagaacccagccagcatggtgtgtgtgtgctcttaactgctacgctctgtcctaacctgttcttttataggtcccagcaaggaagcttttctcctggtccacaccgctgcctgggcatggagaaacctgctggcacattggccaaggttgggggtgaggggtgatgtcatgacccatccaagaactgtaatctcctgtcttcaaggaggccagttccctgggctgacgcttcatgcatagcggctgcatccctgtctccccacttctccatccccttccaggccgttcttcccccatgcacacacatgcctacacatgcctgcaataactccccgataggtagaattaaaattttgaaaaacttaagctaagactataaagtaagaaaggctaaatcagcttccttccttcttccctttgactcctgcaaatctgtagcttccttcaattcattctggaatttttttccagttttcaccctgattatcctttattcttgtcttaaaaataggcaggacattttctttgggcagcggggatggcctgttataaccttgctctctctatatggtcacagtgcattgcatggaagttgggagcaccctcgccttttcctgtgaggtcactctttgatttcctgcaccctctctgccctgtcaatgccgcagggtctgtttttcctataagtctgatgctctcttgtccttgaactccttttccgggtgggttttaattagctaaatttgcatgtgacaaaatgagatataaccttcgtggggaaattcctcacagctttctaggctgggagaaatcgaccatgccattttgtgatggagtgtcccagtttaacacggcaatgtgactgcagacttcatccgcctggtgggcactttgtccccatggctgagtttcaggcttcctgaccttcctggtgggcagccacggcgaaatctagacttcctggtccctcctcagttccctatggacgatggcaagattttgcaaagggacaaaaggaaacttttgctgaaaccttctaggtctttaatcacttgttctttttccttctaaaattctggattcttgccgagcctctttgtgcttcctcttttcattctctgtcacctccacttagtctcgttctcacctgctcctttctctttattctccaagggaggggaagacaacttgaattttaggaacaaagcaagaaacagtacatggaaaggagaaaaggtgctgtggccactgcagaggggggacaggtggctgagaacctttgtaagccagaaagaactcttctctcccattctcaaatataattagttatttctaaaattgagctgaatcgtgggcatctttttccactcaaactttttttaacttaaaattaagttctatgtatatatgtgtgtgtgtgttcattggagaaacagtaacaccacacacaacttagctaacctaggaaggtttggctcaaatgtccattgcaaagtaattaagaatctcctctcctatgctgtgtttacactgtacattcccataatgtccacttcctggctgctggactctgctctataaatataaccagtgagcagtgtctctttcatgctcagctcctgaccagttaaggggaggaggagatgagtccaggaaccagagttggatgctgggaatctccgtgctgtccttccagggaacatttctctgcaccgggccaaggacccacgggatcatccctttccattgtgaaggaaccgaggccgcctcactgggctccattttccagtatttttagttagcagcctgcaagtgagtgttctgcctgcagtgctgtagaaactggcagatgctctgtgttgagtggtgtgcaggacagacaggagtcggtgctggagaggcgatggctgcaactggggcagagaagtgagccttcctgtcttcctgggggtgatcatccccaaggcagtgcatcacgctcccgtgttcaaagccgcagtggtataaactctcgaagagaacagtgtctacctttactctggaaagaagtaaccgaaagacaggagcggatgttgcctcctggcaagagggcctcacggtgtggaggggcaatgccaaccttggcggtgacggacttaggttctattatggctctaatacttgctgactctgggaccttgagcaagttatggtaaccctcagcctctgtttctccctctgtacaatgagcatcacgatagtcctgttctcacagagctgctatgaaggttgcatctgggaagcacctggcaccgtgcctggcgtaaaataggccctcaggaaatgttggctattattatggccatgcttgactggcacctcagtttgatgtagtggttgtcacgtttcatttctagcgttctgaataggctgtcagtagagaggtaaggaggtaaggactctggggccagactgcctttcttcaaatcccaagcctgccacttaacagctctctgacattgagcaagttaattcatgtgactgggcctcacttttctcatctgtaaagtgagtatgaagtgacgtatacttcactgggtcatggtgaggggaagtatgcaaagcaggagttggtgaactggcgaacaggccacatccggcctgccatctgcttttgtaaataaaatggtatcagaacatagccacacgtatccatttatgtcttgtctgtgactgtttctctgcagcagcagcagagatgagtaattgtgacagagactgtctgtcctacaaatcctaaaataaaatcctaaaatatttactacctgaccctttacagaaaaagtttgttgccctctgattgtaaaaggtttaaacagtgtgtggcacagagcagatgccaggtaaatgtttgctgttattcctgctggtactcctctgcagttcgtcacccccaaccctcacattagctctgtgaagtgggcacacagaggtgatgattgttccctgtttattgcacctgggattcaggggactcacgtgacctgtccaaggtgaggccaggcctaaaatctagtctagggctcactcggccggtggctccgaatcagtgacatctgccttgccttctctcttttttttttttttttgagatggagtctcactctgttgcccaggctggagtgcagtggcgcgatcctggctcattgcaagcgccgcctcccaggttcacgcgattctcctgcctcaagctccgcctcccgggttcacaccattctcctgcctcagtctctcgagtagctgagactacaggcgcccgccaccacgcctggctaattttttgtattttcagtggagacggggtttcaccgtgttagccaggatggtctcgatctcctgacctcgtgatccacctgcctcggcctcccagagtgctgggattacaggcgtgagccactgcacccggcctgccttgccttctctttagattcctcaaggacaaggatgcatcagtccatctccctgaggcatggacagtgcctcacagagcccacccagtcagtatctgcggagttcatttgtcttctgtgctccacctggccagcatcagcactgagcactccaggaagagacatttccaaccctgggccgttcacctcccagcacctggagttgggagcactcagcttattaacagggcagaaactcccaggttgcacgcacagcaccgaatcctgaagggcacaggccaagaccctctctccatcccgagacctttagtcaggattgtgggtgtggttgatgacagctgatatctgggtagcaatttatggttcactgaacacttttacatccatgatctcatttgatcttcatagcaactactcagggggacaaactgggtgatggcctacgctgtagctgaagtggagagagactggcacctcctccaaggccatgcgttaaatacccactgagccaatggagccctggtcatccatctctaatccagtgacctcccaaccccagccggccctcctgacttgatcattgtggtgatgccagtgctgtagccttgggcactcattccattgtctaatgaccctcactgtccaataattcttttttgtctgtaatggaaattccacatgctttaggggtttgttctgctctcagtggagatgacgacaagccacccagaataatagctctactttttagtcttcagccttgaagctgtcctctccctaaccagcccaggctggctcttctgtccttgtgggtttgctggaacacagaccatcccatccaccctggtgacttctaccacatcctgcacttagagcaacttccagcatgacgcagaaggagggacagtgtgttctgcgttggctcagcccgtctgcagaacagtcatgtcactttggaagagcctgagtttgagagggatgtgtgtctgctcatatgaatacttcttgatcatttagtttctgtcatcagtatctggggagtggagaatcgttgctgagggcttctgaagagcaggggagaaaatagatcacgttgacagtcagcataaggtcatgggggtgaagggcaaagggaagctgagttgctgctggacagtgtggtctactgacatgtctcctgggatcgtgaccatcatgagggcaggcggtcaatggctggtcagagctatacccagctttctagtacagtgatcctaaaggacatggctgaagcgtgttgaaatcctcctttgtaatgaaaattctcccctgcaaggggagaagtagcttctatgaaatttccagcagaggtttccaagccagggaggttgaggtaggtcagggaggccgcaggtgcttatctaagtggcactgccacagtctttgagtttccattactggcctcctggattcagtggagtcctgctagacgttgtcattgcagggcaaccaaacccagccccgggcccatgggaatgaacatacatatcttctaatggttagagaaataaattgctttataaccaaaatacccttttggttatgtgtctctcttggaaaaataatcagaaacagctgccctgcagttctccagagaatggagtcttcctagtttccatgaagcgaaaatgtttcggaaatcagaactgaatgaggctggggcgagaggtggggctgaggatggactcctggcacctcctctgattgatcctaaatcactttctcactctggccttcggtttctgcatctgttaagagggctaatgaaacctgtttcttactgcaacttgacaccatgaaaatttagtctctcatctgcagcaggcttaggcaaagtggctggccacataaaacagcttgaatccttgagcatggtggatggagtttgtttaatgagtgaagctgtgtagcccactccatgtctgtcctaccattaaaatttttattgttatttgtgaagtatccactggagttcagaaaaagactgcacaccactaaatcaagttggctcagctcctgctgcggttaaaatgagtgctgtaaccccaattaataacgatttttttccaccagagatggctgcttggatgaatgtattatttgctgggggctcttgtggggcttgcttgaagtgtgtaaatagtccgcctgaaaaagaaagtccaaaaaagggctggtttagacagagtggcctctgcaatctggccacagtcaaaggcttcttcacatcagcagctctgatacgatacacaaacgtttgggttgtaggacagtgtagaaagaggaccctctgggaggccaacgtgctgagtggaaggtggaaggacatggaaagcagcaaccgtgcagctgaggctaagaagccccggagcaggcttgggggcttcttgtgtgagtcatcatttgtcctccactgtctatcaagaagcagggacaagagttatgcactttaaatgtcaaggttgcctttgtaggtggtagaggcctggtgggttccaggagattattcaggttctatgtagagcaaattccagatcagatgaaggtgtttgtgcggggacagctgtatgttttctgttacagacctgttaggtcaaaccccttctttcttttttctaagctcttactcttccccagtttttacttcccaagactttcttgggtccttccaagtcctccttagaggatggcactttgctgggtccatgggtttaactttttttttttttttcagtctttcccatacattcgagttagcttgaaagtgttgatggccctctcccgcaaaaggaatatcatttactccctaccccttgtgttacatgggcaggggaaggagggagtttctagctcatgttcccggaagggaaggtatggcaggaacacatcccacttttccctgtctctttatgcccttgtccccaggggagaagtgacctatctgactggtgagtttggtgtagccccttctgggactctcttttgaatccacttatccccaaagaagggttcaccaagttattgggactgatctggccctgtggggaaaacctgtgatggtctcaccttctggcagggtaagtacatttaatagtggttgaaatattaggaagtccttcgaagcccgtctaagccacttcctccattttataatttgtttctaatcaagcttttggtttgatttaatctgtgtgtcctatatcttacttcttaattggttctgagtttataaggggcagaaaggatgattatttattggctgccacccaaaggcttagaactcctccttggtcattgactgatccatgtggaaggctctccaagcagctctgggtacagtggaggccaaacatatgtgcatacttttccccaccagggtactatttgcaagtcattggaacctaagtccgtggcttctgttttctaagaacatctgctgtggaaatgctattcttttcctctttcttcatccctgaaataatgataccttcctcgcaggagggtgttgaggattaaataaaatcaagcacattcacacacgtaggtagtcagtaaatgtcagtttctgcctctccgtccatccactggtaacctacattgtttaagtagcgcttaccactattcattctgatgtccaaagtatgcctctcatgttgcaatggaagatttcttctatctcattgggagcacttaataacctttaatacatgatgtgaaaaccttctgtctcacatgcctgatttatgggatcactggagagagaaaactttgaaaccaacagggaagtaagggatgcgtactgagtgggagaagcaacagtactgggatccaggggagggctggatgggaagggctcagtcatggataggactgagggtgtgctggtgagcctggaagccatcactgggtgaccaacctcacctgggcacttcttagtttggatgtgccttatttaaagtaaaacttgacacagtccagaaaaactcgcaatgcaaaaacaactcacttttctggagctttactgtgtgtgcccagcactgtgctcaccactcgagagcccctaggcaggcaccctccctccagttgttctcagggagtggggtggagagtatcagtacagaggagagcctcaaacgaccccagactctgtctgtcagtatgcttctggaggatgtaggctgagtcttatcttctcaaccgccagttgtctgtagtggcccttccatttcatgtcttccttagacacatactccagtctgttgttttgagtgttggctgtgaactctgtaaccctgtattttctgttttcctcttagtatgagaacgaaggtgtgggcccggattgccccattactcttgtgtcctgtgcaccttttgtatcgtgctgcggcaaactggcacaggggatgtcagctccgcaccctctgctgtggattgtccagggtccaggcttccccttcctactgctcacccctgtcccctttgctgttaacacctgcccgtgggataagggaaaagaaaaaagccactcaaactactccattgtgagatttgctatggagtcagggctgaagtggggttggttgacttgcagaatctgtgaatgggggacgatatatgttgagaaagtgcctgggtgattctgatacgtcccatctacactttgagaactacaggttcattaccactgccaagaaaaagatcttttcatatccccccgtcctctcttcacttggatggcagttgagtctctgaaagagattcatcccgaaggtcttttaagtgaagagaggcaaagcttagcttagtatttcctttctgaagagcacatacccctgtgtaaaattgaggagcaacagccttaaatggaagcagctgtgattccccgcccctgtgaaggggctgtggccctgcagatgccacggctgtggatgcgtagagcttgggtaccctccctggcttcatggctgacctgctgtgtgaccttgggcaagtcagatttcctctctgtttgccatctgcaaaatatggatacagacccgtgctccctcctggttttactgaggtactgtgagagccagtgaaatcacggttatgggatgctcagcattctgctgcagaaaaaaaaaaaaaaaaaacctagttactaggaaagcaccattccccaggtgtgggagttctcagtacctgtgtggagtttgctaacagacctggggtcattcggggtgtgacaggcaggccctctctcctagatccaggtccatttactaatgtccttgcccatccatgcctgcaagaaggaagagatgtctgaactgccaggaggtggtggctacagatggtccctggcacagcaagaaggcagtgccaatcaaaggaggtcggcctcttcaattagaactctgagcagatggggctgaggcagccagaaggggcacttcccagtttactaagtgtgtgacagtaagctggtggccttcagaagaccaggagggtcacctggttcatttcctttctggaaggaagggcagtgtttaggataagtcagatgagattcctcctcattggacagataataagctttattgtgagttaagcaatatgcttggccctacggatatcacattaaacaaaatagacctgaccctgaccttactagtttacaatcacacgatcctgaccttactagtttacaatcacaggatcctgacctgactagtttacaatcacacgaccctgacctgactagtttacaatcacacgaccctgaccttactagtttacaaccacacgaccctgacctgactagtttacaatcacacgaccctgacctgactagtttacaatcacacgaccctgacctgactagtttacaatcacacgatcctgacctgactactttacaatcacacgatcctgaccttactagtttacaatcacacctcctgtttcttgccacttgcacacaactcagggatggggtaggaggaggaatatcataaatgcaaattcctgtgccttacactggagctactagatcagactacctggaggctaagcccaggaatctacatttttaacaagcttcatagttcagccttgcacatattaaattttgagaactggttacttctccatcaatgcatggggtaatcagtcaccttgggcacattggtgtcttaaaaatgacttaaacacataattggaactgttttgctaagtctagcctgtgtctacgttgctagaaaagccctttttccccttattctgatggtatagaagaaaacaactgcttaaatcaaatgaattaatgtgttgattgagctttcattacctgtctagcttcatgctgtttggaaaataaatataaaagctataatcctggcccctgatgagcgtacagggttcttgagttgataaaacacaccagttaaccagttagagatgacgagaagatggtgcaagattaagagccaggacgtaaagcagatggcgcgtttccaggggtagagaaatgaggacatcggcaggtcagcattgcagccacatcctttctagccatcctcagattccagcctaatgatcagttgtaaactcctaaagaacttaaaaaaaatcctggaaaaattcaggagattcagggtgtagtataggaatctgtttgattaaaacactccacaggtgattctgatgggtgtttccaggtttggaaaccagcatgctaccttttaaaatagtaaatggattagttatctcttttttagagggggcatgagaacaacagttcctttatccattcttctattacaccagatatgttacagttgcactcaaaaatcgtggtgactcaacacaacagaatgtaaacccaatcaggacgggggtggctctgctccatattgtaggggaccagggctttgctgtcttcgttggtggctttccaggcctccctgggtgttaacatccagcactcagacagtcacagaggaatgaacacagttgtttgtaatggcggccaagatcgtccaggcccggaagttgtgactatcactttcactgacatttcactggccagaagtcagccatgggccacacctgtctccaaaggaggttgagaaatgtagtccagctgagtaccctggaggacgggaccaggctgtggtgggacagttcagtcttctctagcacagcggtctccaacctttttggcaccaggaatcagtttcgtggaagacaatttttccatggaggaccgagaggggatggttttgggatgaaattgttccacttcagatcatcaggcattagattctcatcaggagcatgcaacctagatccccagcatgcacagttcacaatagggtttgctcccatgagaatctaatgctgctgctgatctgacaggagctggagctcaggctgtaatgctggcttgcccaccgctcatctcctgctgtgcagcctggttcctaacaggccatggaccggtacctgggggctggggacccccgctctagcgtgttcccttcctctccaagtctttaagcattttcattgatctcttctcctccagattctcccaggttctcaagcagtgaggttccaaactaaggtttaactctctagtcttcagaatgttcttttctaactgttagaactgcaaagacagccttgaaatggtatattctttatacctgttgcctccacttcacttggtcttactgttaggtttaaccttaggaaatcactgatattttttgacctacagaagcggcattttcatacaagtgaatgctacactctcaacttgattgaagagcaccctcaatctgccttcagcacgtgcactcccactctgcagtaggcagaggtttgagaaccaagccaaaggaaagagaagagggaggcagagtttctttgtactacatctcatcacctgctgtgtttggggtctgccctgtcccaccatagtaaagctcatatcccacctcttcctgaaaccttaataatgacatcttatttctggttatttgccagaagctttcacacacatgatctcattcattgctttgaggaattcgcttgtttccgcctctcaatttatgagataatgagagttatgtaataattcccttcttcagtttaactgccaggaaacttaggccagcatttgtgattagtcagaataattttactgtgtgtttttggttggtatatattgttttaaaatatgtattttactcattaatttttgaaaactcattttttcctcaagttttttttttaaatgtgaaattttaaaaatctcaagttcttaaaaaatgatgtgggataaaacaactaaatttaattatatcatcgtctttggaggacggtgttatcttcatcttgcatatgtagaacctgaggtccataaaaaccaattttccgagcccataaggctcctcagtggggtaactgggactgggtttcccaaccagatttaatccagggccccttctgctgtatcaatgctgcccttccagactgtccctttcatcatcactttaatctcttccctctcgatttcagataactcgtattttaagacgcctgaatattttctatcttattattgtagatatgtgagcatcagctccttaaagttaccgaatatttctgatcaaattctggttatttttgtctcattaaaatgaatatttaagttttcaggagagaagaaggcacaaatctcccttaaaaagtaatccatttgagagatggattaataaagtaatattatgaattcaatataaattaacatatgtgttttcaaattccaaaaatagatgagggagatggaattacactagtgagttcagcatgattcctaaccaaggccttttcataagtggaagtctttcacctggccctggggaaatcacggaactcaatatttccttcacttaattgtttttcttttccatttaaggaaaggtagcttaaagcagtggttctcagaatatggccctgaaccagctgcatcaaaatcacctgggaacctactagaagtgccgattctacaaaaaggaagctccccacaccccgccctgccccacacgggacccagcagtttgtgttctaacaagcccaccaggtttttgtgatgtatgctgaagtttgagactggttagcttaaaacagcctctgagaggggctgcaagccactctttatttggatcataactaagtagttaaaacatccctgagtgaattcaaaatgctaatgaggaaaattaatgtctttatcaaaaaaagaaaaaaagaacaaaacaaacctcaggagaccagaagtaagttgcctctttaagaagcagagccgctttgagatgttgcaagggggagctaagagcagggcagaattttccagtgtcttttgacaggaggaagtggttggggacgacttatttttttggcccggagacagcctgtcattattagactaagcattgtatcagatctaagtgtgtagctttcttaatgtaatgcagagcaggagctatacgttttgttttgtttttcattttatcagtaagaatgagtgcattacagcctgggcaatgtagcaagacctggtctctactaaaaaagtaaaataattagccaggcatggtggcacgtgcctttggtcctagctacttgggaggctgaggtgggagaattgcttgagcccaggaggtggaggctgcagtgagctagaactgtacttctgcactccagcctgggtgacagaaagcactagtaatagctttgtgagctaagtcccgctttcttgggtgttctcatggtcatgctcagagaatccccctctccccaccagcatccaccagactgcacactggtgtgcaggagaaaccagcttgcctggcagcctgggtccagcagtcccaaaccatcagaaggaagaccgacatcctgcacctccacatggtcactaattccctgctgtggggggcacattttggcctgacttggctgacacaatctggggaaaaaagagaagtatgggctgagtactgtggctctcactggttaatcccagcactttaggaggcagcagcaggaagattgcttgagcctaggaattagatcagcctgggcaagatggtgggaccttgtctctacaaaaataaaaataattagctggccataatgccacgtgcctgtagtcccagctacctgggaggttgaggtgggaggattgcttgagcccaggagtttgaggttgtagtgagccatgatcatatcactgtgctacagccttggtgacagagaccctgtctctattaaaaaaaaaaaaaaaaaaaagaacaagaagaagaaagagacagaaagaaaagaaagaagagagaaaaggagaggagcacagattgctcaaccccatggaggcaaggctctcacttctgctggtggggccctcggcccgtcctggagtcggggtagcatcatggttgagatcacatggactccttggctaaagtcctgttttgaacacttgttggctgtgtgatcttagattaggcactgtttctctctgcctcaacattcttgctcctaaagtggggttaattatatataccttgcagggctattctgagaattaaatgagttaatgcagaagttctgagcctttttggtctcaggactcctttatattctcaataactactgagaatcccagagagtttttatttgtgtaaattatagctactcatgtttattgtattagaaatcaacttaattcattaaaaaaccgattgtggccaggtggtgtggctcacacctgtaatcccagcactttgagaggccgaggctggcagatcacaaggtcaggagatcgagaccatcctggctaacatggtaaaaccctgtctctactaaaaatacaaaaaaatttagccaggtgtggtggcaagcacctgtagtcccagctactcggaaggctgaggcaggagaatggcgtgaacctgggaggtggagcttgcagtgagccgagatagtgccactgcactccagcctgggtgacagagcgagactccgtctcaaaaaaaaaaacaaaaacaaaaacaaaaaaaactgattgcatgttaacataagcaatattgtttctgaaaaataatttttttgtaaaacaaaaaaacagaagagtgacattgctttacatttgtatagattagtgtctgacttactagaaaacagctgggttctcatatctgctctgtcattcagtgtgttatggtatcacatcatgtaggctctgggaaactctgctgtgtatttgtgagagcattacagtgaaaatgttagagttgttataaaaatagttctctcctcacagatacacgaaaaaggtctcagagatcctgctggggttccttgggacacactttgagaaacactggattaataagtcatgacaagtgtttagtataacaccttgcatatggtaatcactgagtaaaacattattacaaacagcactatttactaggagatatagcatcagaggtggttttctatacatatatgggccaagctctagaagggtccttgtgcaacacacacacacacacaacaggtgcttctgctgttgccaccagcagttccatgccatcccatctggctggggggagccctgaaagtgtctggatgtatctgaagctgctgtgctgggatgtgtgcagtactaatatgggaatgacagtgagtggacattgcatcacatagtagcctttcctcctaggaggcaaagcactcacctccccatcaccctgcagttatcctcatgggggagggagccagtccagtcccttgggaaggcagtgccagggccaggacctgaacctgcctttctgatctacagcagagtcaggctaaagagggcaggcagaggctcgccaaggggcacagtggagtgcttcaggactcacagttgctggggctgaatgctggaaacagcttgtcagttcaacccaggagatgctaagatgcaggctagagtcgatgacttggtcctcccatcaggggcttgcagaccatgtgacagtcagctggcactcccttgacctttctgttgagtccagaaaccatagtgcaagcagtgggctgaaagctgtggcaagctgctgtgttggcatgtaatttggaaagcctattcacttagccacctattaaacacctggtgtgttttgagtccccagtctgttttcttgttcatctcccaccaagggaaaagcaacattgaccaatcaaaaggcaggctcagtcttgtagtctcagtagtacagtcttccctgtggccaagacggtgtcttcagcatctgcagtggtgtgtgcagccataggttgacaatgaaatgcagggagccaggatcaggaatctgacctgcaccaagagctgtgggcagaacagaccagcatctgtgtgatgctgtggctggtggtgcaggaggccaggaggcatccaggagccagagggatgccttgcaggactggggtggggtggaggctgtgtctaaaatatgggatgaatgctaagaatcagaaagttagtgaccgcaggcagaagctcagaaacacacagcagatgtgaaaagtgctccttgcccctgctttttaaatgttatctgaatgcccacagtgggcagaagctactattcagtcaacaaataatggtcaagggctgggcattgttgtaggtgcatcactagttacctcagtgaataaaacagacaattcctacctgcaaggaggttgcacttttgtgggaagaagaaaataaaggaaaggagaacataaaggaaaaaatataaatacgatacataatattagacacagtggagggatgaatgcagggatggagatagggtgcttcagggtggggttatagcttttaatagaggggtcagggaaggtgttactgtgaagataacgtttgagcagaccagtgggaaatggcgaggtaagtgctgtggatctggggagagggcattcaagggagcaggagggccaggtgcagaggccctcaggtgggagtatgcccagcgtgtctgggagcaggagggccaggtgcggaggccctcaggtgggagtatgcccagcgtgtctgggagcaggagggccaggtgcggaggccctcaggtaggagcagggaggaggcaggtatggctggaacacagcaagtgctcagaggtgaggtcagtgaggaacagagggcacttagggtcttgtaagtcattgtgatgactgtggtgctaacttggggtgaagtgtgaagctagtggaggctttttagcaaaggagtgactgatctgttttgaaagagaatcattgctgggagcttctcggtgttggtagaagtgtgacggtcagtcaggaggctggatcagtaatccaagaggcagatgttagcagcttggaccagagtgataaaggtggaggtggagagaagttgctagatccttgatacattctagaagtacaccagaaatgatctgctaacagaccggacatgaggtatgaacaaaggaagagggaagatggactctatatcttggcttgagtgaatggaaggctggagagtcaccatgatccgagatgggcaggagctggttggggtgggggaggctcaagaattggggtttggacatgccaagtttgagatgcccaagtagagactgactgtagaggtctaggctggagcaggcagaaagacccaggatgtgcaaaggaaagagggaaacagcagcagtagcacttgttcagccaagtcctgcctcggagatcaaatgcataaaggaaaggaaatctcagagccagcctctaaccctgagcttaatcccaaagagcagcagagtagcctggggtatccacccctccaccccggtggtgctgcagagcccctgttgcactcacgggtggcaagaggcagggctcaaagcttacctcacaggtgtgactcccagggagtaggggtagggtgaggaccccgctggaactggaatggactctcctgtatagtgatgcctcctaagcctggggatgcctctgcaagggctccagggggctctcaaagaggagcaggctctgcctttctcagatcagccctctggctctgttgttcccttgggcctgtcttcagataaccacagtaatccagggagatgaaattggcagatcagaagcccttgattagacctgcagaatgtctgcactgacaagaactgcagaaagcatcccgttcaactccctcctcttacagatgggggaactgaggtccagggagatgatgggacttgtccaagttagaagcttcatgacctagggcaaatcacttaacccttgcaatcatgccaagttgagagcattttcctaaatgctgtggctcagagatggctgtgtgctcgtggttcctcctgtttctccctaaccctcttccacatgggttttttactgcccgatcagggtttggggaatgattggcagcccggaggccagccagcccttttggcaatccagtcaaatctgcccactggctgatgaaacatggactcccttggcagcgagtacttcctcaagagatatcttgcttaaaattgatggcccccctttggctttgctattccccatgcccttggtggggcagagagttagttccatcccaagttcttctccatttgccagagtccacctccaccccagcccagagctgtttgctctggcttgccctatcctgcgttggctcctttcactctctgcaaacccttctgtccttcccgttgtctgagctgcctttttcttgactacttcttaagcctctggatttctccttaaatatcagctctaggacgcctgcctgatgagctgaggtcattcctaccctcaagtgacctggtgaattaagcaacaataccagggattccaggacagtgagtttgaagatcagcatctttgctggcctgagggaggcccttggcctgctgggggtggatagagtgatgctgaccttctgcacaggctttgggagggaacagttagttaccgcaaatgtctggctatctaggtgaagcactcccgaccctctgctcctcaactgtagttgtgaattacagagctggaaacagcacacgggagcatttgttccactcctgtttcagggacaaaacttaggcctgggtctctaaaaccagaggtgcttgatgcttcatcccaaggctaaaggggcagatgccctctctatctggcgttgtggtttcctctacttccaccttactgcagagtggggggctggaacgttggcaaggatccaggactcctgtaccctatctcattctcctcccacacccctgtcccttcattacagatagtccaacctctttgttctgtggttgctgaatagcatcccccaggggaccatcttccctgcaaatgcagggtgacgctgtgcagtggtttctctgccatcatcttttctctgctggggatgccagagcataaacccatggtgcaatggaatgtgcctggtagcaaggatgaagacgcgggggctccagtgtgctccaccccttcctttctgtcagcctgagtgctcccgccccctttgggcctcagtctcccacagagagggagagctgggtggcccagcaatctctggagccccttttggctcagacctcctgcagttctctgtagcctcctggttcccagtgtatttttaaaggatcctgtgttatttatctcagcatctctgcccccctgcgctccacgctcctatccatgcagtaatgacatccaaacacccacactgtatcttaacaatctgatgagataaatgcctcatcgttgggctccgtggacacagagtagcaattctattctgctatcaaagagctcagaaactcaggcaaccaaggcaggatgagcaggcatgtggcttgccatgtgcccatcattgggcaaaaacacattctccctgccccaaagcccctgtttttccccaaagcagcctcactttttcccttcctccacctccagaacaatgccttcgagcctgctggcatttgagaatgggccgggcgggcagtactgggggcatatggccttgttattttgatggagctcctagtgggatgcaccagccactggccaggtcctggaaataattaagctgagcatattgacctgggggttgcagggccttgggcatgctgcaacctccaacacctgttctcatgctccttctgcagtgaccctctcgtgctctaggcacacctgttagatggaacctgggactttcaaggttgtcactgccagggctggcatgatgtgcttgcactcctgctccctttatggacctgggagttgggaaggtgcattgggttccaagagaagcaggaactgatttggtcttgtagtgaaaatagacctggctctggtttggtaagtgagtgaccttggacttagtttccctagaagcagaaataggataacagtaagtcttcccacttcaaggaatgttataaggatcaagtgagatcatgtgaaattcttaggaaagctgcaagggagtctacctatgaaacacagaggccatgggacacagagggaggagtaagggctcgagctgggcaggcctgggtgtgaattccagtgtttctcttcaggctgtgctgcctagggaaatgtacttacctcttctgagcttttctttgctcttctgtcaaccaagggataatgaagctacactgactggttactcacagtgataacaggagtatctgttatttattaaacgcttatgttgagccaggacctttcttcctttcctttttaaaacctccataaaatgtagccggatttgtaatcacacattacttcacgtggactttggctggtttgtgtagtgtctctgtgagagcaggggttctacgggtattgcccggcgctgtgtttccaaagcccagcatgtgcctggcccacggtgggcgcttaagaaatgttcatgcagtcaagggggtgcagctgcctggcaaggagaacccgggaaattcatttacccttcttattattcagttccttcacctgaactctctcaggctggagctgagctttgggttcataatatataattattctccccagttaaaaatgactaaactgaggtcaggagaggttaagtgctgtgccctagatcactcaactaggaactagggaacaaagccttcttgtacagtacttgtcagagcctccttggaagcttgggaaaagggtgtgggcaggactgggcagggaggaaacagctgagcacctgccggattcaccatctgcccccatgaagatacatggaatcctatctctcataacggcctccagccatgcccattttacagatgagaaactgaggctgagagggagaaagaacccgaagctcagctccagccagagagagttcaggtaaaagaacagaataataagaagggcaaatgaatttccagagttccttcatcccagagtaggatgctcagccttgccaggcagctgcactcagcttcccgccctctctgagcaggggggttggaatgtgtctgcggagggcagcgaggaaggagcctgctggaattccttccctgtggcacatctgggaggggtattccccctggtgatacttgggaaatcatgctggcctcgccagtccttttttccactgttcttttggtctcggagcacccgccaaacatctgacactgttcaggatcgattgcacataaaatgaagaatgggtatttaaaaaacaggtttttttgtgtgtttttccccctgttgtcatctaagaagcaggtttttaggttctttgattctctcccagaataacaaccatatggggcctccacttacactgagcagcctgtgccttgtgccagggactggtttgtttccattgtcagcaaaccttgactggctccaaacattttcacttcaggtggtttctgaaagagggaaagactgaggggaaagtgatgatgtggtccctctgaagagggtttagctttcaagggtatggcaggggtggggtcgacagccagaggggtgtgactttgagaagccaactcaccggcaggatccagcgagatccaggctcggtggctggaacaaagaatgttttgaaccacacggggctctggcatgtttgttgatcgacttatccaaggcctgggccagctgctcttgttccagaagatttcatggattaactccctgggctttggaaaattgtgtcttttttaagaaagggaagttttgaaaagcaaatgctcctgggcaggctgggggtgtggggagtgttggctggagtgggaggtcacattcgccccatggtgggatggccaagggctcccagcgagggaacagttggacctgtggtgtcctggggggagggttcctctgagggaccctaatggacagaggagtgtggacccctgagcctgggagcatcgtgggcatttagaccaaaccacgggaagggctccccaatgctgaaggttgctaggcgctgggggaggttccccgggagactgtggctagaaacaccatctgccaaagatgatttagttccggaagaggcaagggatagaacgagatggtcctttctgtcccagttaatcttggtgctgttcattccgggctgagcattcccttcctgaagtggaatggaagacagactcggccttgggcagactctgagcatcttgtgaaagggagagtcttacctccttggctttgtccccaccccctgcccagggtcggatgtcttgggtgcttgccggctctctgcccactgtcctgccctggcagcaggtaccagcaagcctgtgtgccgtgtgggttacagggagtagcgggcacatgattaaatactcatgctttgtcaaaacactgacagttacaaaatgcctccgcgtctactcagggaagggtgagcaatgaggaaaatgacttcaatatgcaaaagacattccaaggagtccgggagggaatgctcattctagagccaggagggagtcatgggaattagttcttgatttatagaccggctgaaagaaatcacctaggttaaacctgcctaaattctgctatctgtgtatgtgcttaaggggatgggctcaatgaactttgagactgtctcttctctactgatgggagtgacagtgaagttcctgatgaaggaaggtttagggtggaggaattctgagcccctgggttctggattcaaaatcatacacagccctctagataacatagatgtacagtcgtacagtctttgtggagaatttgaaaaacgagaatggtgattatctacttaggacaggtttgggtacagccactcatggaagccaggaaccagcttctaaccatggaagctttgtgttttctgtataagctgtccttgactacggacaaagaatgggtaccgagtgttcagttggcatcataataggaaacagaattctacacagatggttcaacggaacagagtttcttgaggggcatatttatggaggggtaaggagaccagcaagggatattgaggcacccagggctaaacttagagggaagctgtcatcaccctagggcctgaggaggaaggggagaaaatactgtttggggggcctggtgggagctgtagctgggaggaggaccatgagggagaaaccatagtcatggaaggatgttgtcactgccaggaccaagacaccaaggtagggggacatggaaagaaaacaccctgccttctctgtcctcccatctccactctcttattgacactgctcattggccaaaccaacctgaagctggagggccagggagccgggcacctcaagcagtccccatgcaccaagcttccagggcacggggtcagggaacagagggtggaaggggtctaggggagccagcagggagctggagctcatttgtaatatttgtcttgtttagccaactctagaaggctcgtcctgagaaggcgagcttcgaaagctattactgactcttaaagtattccatcgtcaagactagtgtgtttaccttgcaaactaccttgagccagctgtaatgaaattctgaaatgtctcccatacaccctccttctctgtgaaatgtcagctttttgagggcagggcctgattcttttatgagcagttgtcttgaatcacttcaaccctccacacctggagtgccttacactttccagaatgccgtactcagtgacccctcatgtcaatgttttgaggcttttgaattggtcaaggcaaccgtcttgctgagtggcctgagttctccagtgagagaacacgagtagtctctttgagtgggggccacagcactccagacgtggtgatggaaccctctacggtatagagagcccacggccatgccacccagccagacaggaactcaggaggccaggatggaggaagcaggagtggaaggtcattggactccctttctggtttaagcttggccatgggatgtcttaagtagggctcgtggtcctcaaatgtcacctccatcctgatgccacaatgtctgtattgccactattccaattcttcttttgggtgaagtcttactccacctgcggggagagcacatgaaatcattagcaagtgctggcacagacagccattcccctctctggccaggctggaggggctggatggtggtggggggtgtgggtgaagtaagcatgaaaggggagatgaagggtgtctagacactccctttgccgagggctggtggcctgttgcttgctctctaggacaacgtggatctgtttggggtaatggcagacacttttctttcgcatccagctgtctcttcctcttctgagtcccacagggtcctgggcccgataggctctgtcacctccagccagtattgggtagccacctgccactactcaggccgggttggaagggcctgtgaggggtggggtgtgggatccagttcatggcttccagggccaatttgggtgaaattcagttgttcttcgactcctgtgtttctacttcccagtttcattctaaatggaaaacatttctgtaggtttaagtccaaggtgcagccccagagcgggtattttcccttttgagaagtggaggctaccctgagccttgggaaaagtactcagagagaatctcccccatgaggcagtgtagcttaaggagttaggtattctgagtacctccaaaggctgttcgctctttccattccagctcagactgcctgagttcaagtcctggtgttgccacttactagctgggtataagttgtttaacattttagttcctcgataccctaatctataaaatggggatgaaaatagtgtctatggtagggaattagtatgaagattaaacagtttaaattgtgtcaaggccaggcatggtggctcactcttgtaatgccagcatttagggaggccgaggcaggagaattgcttgagcccaggagtttgacaccagcctgggaaacatagtgaaccccatctctacaaaaaaaaaaattagcagagcatggtggtgcatgcctgtagtcccagctacttgggaggctaaggcaggaggattgcctgggcccaggagtttgaggctgcagtgagctgtgatcacaccactgtactccagcctgggtgagagagtgagactgtctaaaaaaaaatgtttaagtgtgtcaagtgcagaaaacagtgcttaatgcatgccatgtgccatgcaaatgtttgctcttatttatttcaagaagcatactcttctgggcagagcatcctcctaggactctggagagatggagcatccgcaaggccaccaacgggactagtatcccccagtgttccccaagcatctcttccatcgagctattgccttgctcacaacccctcagtgagttgcttgtctggagatgcaggccaaatcaatcctgtctacaatctgctgtctggctgtgcccattcctggccacaaaccctctgcttcaccaggaaaatctgtttatgggccccattctcctacttgttttcacctctgccttaccctgcctgaaaagctctccttcctcacctttccctccaaagcctatccattcttcgattccagctccagttctgccctgaaggcttgtccatgcctgtggatcaccatcctctgcctcctgcctcctcctgcttccccggctggtgtctgcctcgtatcatcagtcacctcctcccaagcagcctattgctttctctactgatgccttgagccggaagccagacagcagatattccaaaactgaaaacctgtggatttgcctgtaaatttgctataatttcttaagaacacaagaaaggctgaacttcctggaagttattcctagggccagcatcatgggagtttgacggttggctgtgtagagcagtcactccaaggcagttgatttgctttgttgttcttctcaccccatcagtattataatgtggagcttcctctgcattgtgccgtgagatgacagcaaaagggctgtggccactgcctgggacttgatccttcgctgaaacagggacactttctatgactagtgctacgttacatttatccgttctattggacacatgttcgtaggcccaggatcagaataaaatagctccacagctagaagaaatcagtttataggcaaacaagactctgatgttggcccttaaaaagaaactgctcatattacatattacagtttaattttgtccgcgttagaaggtcccagtgatatctttgcttcttgactgtagtctagtgtttaaaggttatttgcccaggtgacttttttatcttttccaatctaaatacagttgtcccttggtatccacaggtgattggttccaggactccccaaccccttggataccaaaatccttaggtactcaagtcccttgcataaaatgcatagtgttttcatataacctatgcacatcctcttgtgtaccttaaatcatctccaggttacttatactacctaatacggtgtaagtgctatataaatagttcttatgatgtactgttttcatttactggtatgatttttattgtcatattatttttattaaaaattttcttttcaaatattttctatctgtggctggttgaatcaccaagaatgcaaagggccaactgtatcaacagctcaaagtggagagcccagggcccaggcacggatcattaggggaagtacagggctggcagagaagaaactggactcccagagccggctctttctgtgggctgggagctcctccaggctgctgggttaggaccagcaggacggccagaaccatggagacatgctgctggttttggagatggggagaggcatgtgaccttttctgggaatcaaatcagagtgaaaccagaagaagaatctagacttcttggggtaacttggcaaacaaagctcagatagacggaggggtgttcaaggaactttgcacgatttcctatgggctaagagaagacgcttgcaaatctgaaagggcaacatagggaaagttcctacagggaagggagacggtcaaccccctctccctgaccccgggcttggttagggggcagagaacgggagggggtcaaggaggctgtctgtttccctcagtgcaaatgcctggacagcacgtgtgtgcaggctgtgcccctgacctgatgagcacctgatgggtggctgttgaccgactgtccatgcaaggggtgtgggctgtgcttggcagcctccagcaggcagggcttgttcacctgcgtcctgtccagcacgcggcaggagctatcctggcctcagtgttaaaaggtggccctgggtcgaaggagtggcataaggtcccacttgggtgcttgataatgatctagagcctcgtgcccttatcttcacggcctcctcgtttatggcagcaagtcctcgtcctgtgggccccatttctaagctggacgtccagcagttccctcagaaagtgctgtggggcccaggcgtcctctcagaggatatgagcactcccgagtcgttctcactgcgtgtgttcatttcactcactgcctgcttccttcgttcagctccaagtacctgctgatgtttctgagctaggagggcttccttcaggtaataggggaagcatgatctggaaaagggaaggtttccttttgccccatggagagacgtcctgagacacttcatcaaccaggaaggctcccaggcagccactgggttgcagtgaaagttttcagccgctggtgactgctctggtgagacttgtgagagagaacagtgacggtgagcacagcagcccctcagaaagcaaaccagggagtggcttcccgacgtgcacggtttctaattcacacggtccctgcataagctaggcattcctgtatcctgttttcacatgaggaaactgaggcccctggaactcacgtagtttgcccaaggccatctaactaggaggccgtaattagtgaagctgggatttacacctagggctgtctgattccgaagctgggctctttccacggtatggtctgagggtgcagtctagagcggggactgatggggtttgtctgaaggaacatgagatggtggagttccaggctggctggtgtggggccccggctgggatgagacagtgtcttcaagtgtcagggatggacgaatgtccctgtcaggagatgttggtccctggcagccaggcatggtggcagcactcccagcctggcctgccctgcacaaaccttcaggcacacaggcctcttgacagagtgatgattgggattccatgcctgcaccagtggtgggagagatgcaggtgaaacaaggcggaaaggaccgtaattacctcctaacaggtttccacatttctctgctgtcagaatggttttgttttctgatttattttgatctgcttgaaaattagttgtggcagtgtgtttggtgtgtaatcattgtcctgctagctagcagtcatcatcagcaatgttagcccggcaaacgtgatctttctttcctttgcccaatacatgtcaggctctgtgtggcaagggcgagggagaggcatgactatgtgtctctgcctgtctgtggaccccgactcctcaccatcacccaacaggggacagtcctgctggctgtgtcttcccggaaggctcgtgcccgcacagattgtctggtgagcccgccagctgtaccgcatcgctctgtgcatgtgacctagctctctcctggccccctgttccatcccacatgcagcctccgtccactgtcccccagctcgcaacccccacgcagccccacccttgacctgccacctccatctgcacctgcttgtggagcctgtgtcatggaagagaggtggcctgaccactctaagcccacagcaccactggatctttcccctctctctgtgagaagacggccagtctcagattggatttgaccttttcgcttgtggtcgggccaggttgagcaggaaaccatcgttagggcacggaagcataggtgggagaagacagccagcactgtagagtggggagggctcagtgcttccacgggtggatgttcagcagcaggccccctctgttctttggtgaagcttgtctgcagcgagccctcaaaaaacatgggttttgagccagacggaaagtcatcaagcccagttacagtcatcccttggtgtctgtggggagactgattcctggacccctctcagatacaaaacccaaggatgcccatgtccttttatgtatgtagattatatgcacatactacaccattttatgtattttacatatggtatattttattttttaatttgtataattttttaatgatttttttttcctaatattttttacccaaagctggttggatccgcgggtacagagggccaactgtatttcattattcagagcagaaaactgagacctaacacataggcaaggatatgcttaagaactactgttggttggctccaggtctgggatatgaacccgaatctctgttgcagtctgtccaaaagtgggctgagctggtttcaggattggagcagacagctgtccatgtgctggaatttgagggatctgccatttcctccctagaatttctacctttagcattacctttgaagtaagtcagggattaccaaacatcttattaccaaagaactctttcttcccacatgacccaacacagaacagaaaagagcagagatgcttttgttcaagtgcatgggaaagaatggatgattcagagctgacctgttcagcttctcctgattctccagcgaggtcccttatgcttcttgctagaacctttagagctccatggagtatagtgagaaatgtttatggcctctattaccagggcagatgaataggtgcagacgttaacagcttctacaccttaattagcatgggtgtgtttagcagagtaattgagatcagagactaggttgataaaagaatagggttcccaacaggatagtttttgattaaggaaatatttggagcactatggaaatgcttgaaacataggaagggcaagttcagctggagtgcattgggatgacggagggtggggtagcggggtagggtgagaatcagggcagcctggaagctggggcctgaatcactggggcagggaccagggagaccagagagaccagagaaggtctcagacataaactctagctactccataaaactacctggagcatgaaaatcccagcgcctctgccacggcctagactgctcatcacaggggttgcaaagtcacaaaaaagatgatggcattgagctttcctatcaggaactatgtcctcaactaatattaatagctgacatttgcatagcacttcacagttaatataacactctcatatgttaggtgcttctcttaataccccttgaggtagctattgttattgttattattatccttcttttaaaggtgtggaaacacagggtcaggggccccgtgagccattacttggaaacactgtcattaacaattacttcttatagttgtttctagcaactcatgtcctggaaatgtctggtttaattcatctctctctccttctagtagacagacagacagacagacagacagacagacacacacacacacacacacacacacacacacacacacacacacacacacacacacacacacacactgagggctgatagggaagaggacttctcttcttgattctccatagctgtttcccaactgttgctctctaacaaaaaaaccccttcagaaccctcagccctgctcagaaatctaaggaggcttcaggcagcaacagtggggtccaccccaccctgaagggctgctgcaaagatctccaggaggaggcccccaacaccattcctcttgaaggtcccagttcagtgcggcttgagtccttcacctctgagtctcagccaggcaacatccgaaggagctgaggaagccttctctctcctgccttctctacctcacaggagatggctcctgtcctccccatctccctcccaccataaccgctcaccaaaaattgacttgttttctctgatgctgctttattgcatgttaatacttcattactggacctgattctgttacactcgcacagagcaagcagagcagagggtcctgagcatgcggcattagatggagaaactgcctccagtctcactcatcgtgctgagatgggttgcatggcacaccactcttagcacagactgaggctggccaggccacccatgctgggtgctgacaggcctcaagcctgcagtgagggccaatctcagtcctcatgatctgcactggggacagaagccatctgattttaaattccataggaataaaccaatgggtggagtcaccaaatatccagatgttttctcccagctttcatatctgccatttatttttaaagatgttttaatggactaggtacaattttcatacataagattcacccactcagtctattgttctatgaatttttaaaaacagcttatctgaggtataattggcatataacaaactgcacatatttcaactgtatactttggaaagtttcaacattgaccatcagtgcaatcaagagggtgagcatatccatcactcccaaaagtttccttttgcccctttgtaatcccagtagctcagccctcctccccacccctgctatctcttttctgtcatcatagattagtttatattttctattgttttatatcaatgaagtcatacagcatggactctcttgactgccttccttcattcagcataattattttgaggtttacacatgtctctggatgtactgatagcttattcctttttattgcttagttgtgttccattgtatggatatagcacagtttatccatccatgttgagctgtttccagttttgagctatttaaataaagcagctatgaacatttgtgtataaggcttcgtacggatgtatgctttccttttctcttgggtagatacctgggagtggaatggttacatcatgtggtagtgtacgtttagtgttttaagaagttgccaaactcttttccaaagtggttgtgccattttgtgctgccatcagcagtgtatgagagttttggttcttctacatcctcaccaacacctggtgtggtcagtatttttaattttaattttagtcattataatgtgtatgcagtggtatctcattgtgttttaaatttgcattttcctgaagactaacaatattgaacatctttcctgtggttattggccactcgtatattttttggtgaagtatctgttcatatattttgcatacattatatttgggtcattttcatattattgcattatgaggtttctttatatattctggctggctataagttttttttaaaatcagatatgtgctttgcaaatattttatctcagtctgtgtcatcttttctctctcatctttgttggaagtcattttccatatatgtgttggtctatttctagaccatctgttcagttccattgatccatttgtctatttttacaccaataccacactgctttgattactatagctttataataataaggcttaaaatcagatagtgctagttaccccttcatctttgtgatttttcatagttgtttggttattctagaccttctgcatttccatatgaattttaaaatcagtttgcctatttctacaaagaaaagtgtttgcttcatgtatttatttgaaagctctgttaataggtgcatgaacatttaggattgttatgcacccttgaagacttgacctctttgctgttttgaaaagccctttctaatccctagtgatagcctttgcgctgaaatttattttgcctgatattaatatagacagtccagtgtccttttgactgtgttagtatcgtatagttggtcctttgtattctcaggttctgcacatgcaaattgaaaatattggaaaataaaaataaaaaatataacaaaaataatgcaaatgaaaaatacagtatcaactatttacatagcatttatattgtattggtttttataagtaatctagagatgatttaaagcatatggagggatgtggataggttatatgcaaatatcataccattttatataagggacatgagcatctgaggatttgggtatctgtggggcaggaggaggtgtgtcctagaatcaatcccctacagttactgagggacagctgcatatctttttctgttcctttactcttaacctatttgtgtctttatatttacagtggatttctcataagcagcagatagatgggtcttgctcttttattcagcctgacttaattggcatattcaaccaatttgctgttgatgccttgctgtgcttcggtttaacctcttgatactttgctgtgcttcggtttaacctcttgatactttgctgtgcttcggtttaacctcttgagaccttgctgtgcttcggtttaacctcttgagaccttgctgtgcttcggtttaacctcttgataccttgctgtgcttcggtttaacctcttgataccttgctgtgcttcggtttgacctcttgataccttgctgtgcttcggtttgacctcttgataccttgctgtgcttcggtttgacctcttgataccttgctgtgcttcggtttgacctcttgataccttgctgtgcttcggtttaacctcttgataccttgctgtgcttcggtttaacctcttgataccttgctgtgcttcggtttaacctcttgatactttgctgtgcttcggtttaacctcttgagaccttgctgtgcttcggtttaacctcttgataccttgctgtgcttcggtttaacctcttgataccttgctgtgcttcggtttaacctcttgataccttgctgtgcttcggtttaacctcttgataccttgctgtgcttcggtttaacctcttgataccttgctgtgcttcggtttaacctcttgataccttgctgtgcttcggtttaacctcttgataccttgctgtgcttcggtttaacctcttgttgttttctgttagtcccatgtagctttgttcccttttccctctttttctgcctccttttggattaactgagtatttttaaggattcagtttcatctcttctgttgacttattagctaaaatccattgttttgttattttaacagttgctgtagggctcatagtatacatcctttttttattatactttaagttttagggtacatgtgcacaacgtgcaggttagttacatatgtatacatgtgccatgttggtgtgctgcacccagtaactcgtcatttaacatgaggtatatctccaaatgctctccctccccccgcccccaccccacaacaggccttaatcatcgcagtttgtcttcagttgttactaaaccccttcacatatagtacgggaacttcacaatagcacacttagatcactcccttcctggcctttatgccgttgctgccatacatgctaattgtgcatttgttctaaacctcacaatacattgttactatttttgtttaggcagtcaatgatcttttcaatgaaaatcatatatacttaaccatgtcagtaccatttctggtacccttgattcctttatgtagatccacacttctatctcatattattttccttctgcctaaaggacttcctttaacatgtcttgcagtgcaagtctgctaggattaaaatcttttagcttttctatgtctgaagagaagtctttatttttcacttttatttccgaaggatatttttacttagtatagaattctcaggtgatagtttttccttccatgactgtaaagctatgattccactgtcttcttgcttgtgttgtttctaataagaaacctgctgtccctcttgtctgttccactgtacctaaatgtgtctttatgccctggctacttctaacattttctcttgatcactgctttgaggaatttgattatgatgtgccttggtataattcttttttcatgtttctagtgcttggcattccttgagcttctggaacctgtgggtttatatttttaaaattaaaattgataaatttctggctattatttataattttttttttgcttctccccccattcctgtgagaactctaattacacatgtattaggctgcttgacattgtcgaacagatcactggcactttcattttatttaattcttttttttctatgtccttcattttggatagttcctatactatgtgtttatgaatcttctctttttttgccatacataatttgcctgccttcttccctccctcattccttatcttccttcctttagaagaacctagggggatttacctaattttataatgattattatttcagaaccaatccagagcttctgttcccaaagccaaactaccgattggagattctggagggagggaacacagggggtgacattcctggaatttgggggacttcgcaggacttgacattttagaggctggattagggtacatccaatttctcctgcttcctccctcttcttctttcctatccccaaagtaaggagagtcctgtgagcccaaaggcactagacagccctagcacactcttggcagacagggctgaacgcccggatttccctctcaatagggaagacttagggagcctctcacaggagtgagacaggaacagcagctttatggaaactgagttccaagtcaacacccggaagaaaactcaggctcccctgtaggcctggaaagctttgtctgagacaatgaccttaggaggaggtcaccaaaaccactccttccctcacagctcatgggatcagagtcagctgtgcctgctgaatgagtggtcaggtacagcgcacccgcctcctgccagagaaaaggagacctgcagtctggctgcggcaggtctcagcagaatctttagctttcttcaggcttgatcagccacctcaagacctgtgctcatttaaagaacagagagtacatgtaagttaggaatgttctcgacttcaagtaacaggatacttaaggactctgaattggttcagcagctcaagatgccactgagaaccaaggctctttctctctttccacttccttatactaagtctgttggcttttcatattcaagctgatttccttatggttgcaagatggttgtcaatggggctccaggcatcacacccccattcaaggcaggtggaaccaggaaggagtggagccaataacactctggcccttttttttttttttacataaaacagaggctttcccagaagtccctagcatagtacttcttgaatttaatctacacaaggatcccctgggaatcttgttaaaatataggtttggatgtagtagatcttgggtagagcctgaaattccacattttgatcaagctgccagagtgtgtcagtgtggctggaaactgcattttgagtagcaaggtgcaaggctacttctccttactcttagtgacacaatccaattaactagctacaactggctgcaagggaggctgacaaagtatcttacctttttcaggggagactttgggtagcaaaccaatatcagtcacagaattctactgaaaatgcagggtatggaagcatctgaagtcacaaggttgggctggacaaattagagccttcacctccatgagggaagaccatggaccccttactctatatccacactcagcctgcagggacagggcattattgccacgagccagtctgtcctgtatactcactggattagggattccactttcagaattttatcaccttagcacccagcacagtgcccggtacacagcaggtacccaatacgtgtctattacactgaaatgtttattggcacatggtctaaagacagtgccagggaatcctgtgaaaatgcagtgctgattcgggagatccaggatggggatccaagatgatgcatttggaacaagctcccagaggatgctgccgtctggtccgaatcctgggccccactttcaatagaaagggcctaggacatgcagagtaaagtccttcctcctgagttagcagcagctacttgtgcttcattcatgcaggcatgaagctgcttgcaaggatgttagcagatattagatatggctggtggggaggagtaaggagggccttggctatgcctttttccaagatccgggagctggatgctcagagatctcatccctggcttccttgtccactgaaaacaaaacagcagtatacccgggtgaggagagagaccagccaagcacgtctttcaacaactcttaacttgcttggctccagccacgaaacaggaacccgccatccccctagctcgtccctggccctcaggaagtgctgaggctctgccgggctgcatgagtgaggggccgatgtctttcagatgttggggcttcagcgggggagtggggtaagctggggagagggagcatttttttgtgaatattttacccacggaaaaagctgaattctctagaacagacctctagatttttttttttttttttggtagtgggaagtgagttactggaatttcttctgaattcgaagccaaacaaagtttcttgcggttttagttacacaagcggctgctgccaagatggaatgaatgagaagagccactgaaaggaagagacagtgaggggctgggggaggagggtgcagaacaggacccaggcgcagcacagaacagccctccaggcgggcatactgcccgcttctatgctgtcaactctttagggagagagctcactgttctgtctgcctcccaggatcagaattaaaaagaaaaaaggtctgtgaaagtgaggcatacactggcagacacgcacacatgtaaatgattatcattgctttgtaatttaccataattccggcctgtgcactctatggggtcctgctttgttcagtttcctgactgagtggcagttggacgagacacttctgcccctaagctgcaggcaggcggctctcatttcagccttgttccagtgtgagtctgcagggaagggatgcccgctgctccaaggggaagcaaggataattaacttctaccagtgatccccaaacttcattttccttagagcctgaagcctcctccttgttaccttcctggtagccacagaatgggccagggccatgtgtctcctttcatttctccagcctgccctctggtgggcgatgcccttcagtgagcggggcctggggtagggccgttctgcagatcctgggttggcttccagtggtgcctggcatctctcctgctctctgggaggagggacgggccgctaagtgctgacggcagcctgtcactcacaccttgctccctctgtagaaacactctgtttctctccattccatccctgcgtgttacctagcaggaatttcctcttccttgggtcaagcgggtgggaagggctcatgattgctgactgaactcaaccctttacactgggcattcaatgtcatcacattgataacttgaaatgggcagtagtgggaacatttacaccacaaaaactggcatatgctacacccagagctttccttccccctctcctaaaagccagttgctaaaacatttaacaacataccactggctggaaccacttgtgaaggtgacgtagggctgcagggagagcccaggtagtggaggaaatggcagccttccttccttgcccatagcctgtgccggctacaactcaggagcttttggaacttaggagctctgttcttaaactctccttaaacacctcctcatcccagacgggttgactttcaatgagaggactctgctgtgccgcagagctggaatcactcaaagcagagtgatggacgagacttactttcgacgttcctaggctcccttccaccgttccctggtctccaaaccccatgttcttatctgacggtatttctactctttttctcaacctgttgctaacgtgctcattcgagagaggctggtgcgcacctacccagcggctttttgggcggcagtggaagggagtgttttattaggaatttacgttatatgtgcaaggaataccacatggatggtaaagttcagccgttttccactgaagatagggattcttcaaactgcacagcttttcaggccatttcgtttaggcgagccctcatgttatagtcagggagtttgaggcccagggacatttcccaggggatgaactctaactaaaaatgaaggtctcctagtcctgtcgcctgttttcttcactcagctgtttaaagggatgttgcctcgtgtgaattatggatgactgccagagttattagaatgaacagagttaccaagagctaaatactcgtcatttatacctggccggttctgttttcagttgtcctttttctttgcaaagagctttgaaacaagactggcctgcttgaccttccatttagagttaatgtcaaagcttgctgaggcctgggaaacaggtttggttgtttgcattaaaagggagtaggaagcaagaaccttaattatcctaggctctggcctatttaataaggaatttgagaagatgtcttagtggctagtattcctagaacataatacttgaaagtggagcgagcgggtgaaaatatgccttaggcaggaagccagataggaagggccagtgtctacaggctctgcacagtaaggaccctgtgggaagatgtcacaggtaacagggcctgatggcccagcacccagctgctttgcagtagttctggcttcggggcttctctgggtggctgaagaacaggtctgtgaggttcattcgggggctcttgttgatcaagtgtggatggtgtgccggacacagggctggggctgcagagtggaggaggcgcagtccctcccccgagagcactgtggccagtggaaggagacaaacaagaaacaatgacaggacccaggctcaggctgtcatgagcagccctcctctggagagtgggaaatgtgcgttgggaactcatgcttacaacttttatgttttttcttactgagcaatgctcataacaggagaaaggatttcttcactgtcccaaaagaatgtgcctcaggactgaaattggtagtggccctcccttactcatgtgccccaagcacattggaacgccagaggaattttaagcagatttttattcttgttttctggaggcaaaatctaaagtgaagggtgtgtgtggagaggtcatgcaagaaatttggaagctgtgtgccttgtctggctgactgtcccaattaccccgggcccagaggtgggaggtcccacaggggcctgcccccagttgacagagggctctttaccgttaggaccccttctgggtttctcaaattatggcttttcctccttcatggtctcctggtacttttaaccccttctctccatttttcccaaggaatattctagaggaagggtttctgggaatgaccttcccaaggggagggatcgggcaagtattgagtcattcctgctcgtctggattgtgattgcgacccgtgcctcatggagtgtcgctggatacgcgatcagtgtcccttgaggcagtgctgcacatggtgcagttccagagaaatgagggaatgagaatgaacgtggctgctcgtgtgttccgtggctgtttaggaaggttgggtcagtggagatcagggcccgaagagcagtttcagcctgcgtggtcttgatgtggtcttggctgatgagaagctccctccaattctgtgattctgggtaaagcagaccatgtgccatcgggagtgctcctgtgattctttaagttagtaattctcatccctggccacacataagaatcatctgggatcatttaacaaaaaacaatgccaggatcctacagtctactccacgcccttcattttcaaacttgagtgggcaccagaatcacctggaggatttgtgtaaacacagattcctgggctccagcttccgagtttcagtggctccaggatggagcttgagaatttgcatttctaacaagctcccaggtgactcgctgctgctggcctgggaccacactttggaaatcacgattatgaacaggaatcagaatttctgaagatgtggcctgggcatctgaattttttcacattctccaggtgattttaacatatagctctggctgaaaacgatttctgatcattgatttttttttttttttgcatcatccaataactattcattggtcagactgtgtgctaggcactgagttagagttgaagaccctcaagaattccactgacaactgaatcatcaaagggaaccgagccctgcccaaggacatacagttgttttcctcttccttgtcctttggagaagcacagctgaagcttcctgcccacaccccagcccctcctccttgagcatgaatgtgcagtaagtatgagagcctgtcatttaccctccctggcctccctctccagccagcttctctctgaggagtgaggatttcttgctaagtacatgatgatggcctgtttactttgctctggagtttgaggctcttgcgcagattctgccttcctggacagttcaggaaccaatcaaccagctggccttggcaacctagaaagcatggtcagttgccctgaaataggttgattgcaccccagaagtgcttttccgcctctccccatcaaaggtgtttgcaaccccattttccctctgagtcagcttgtccattaatgggtttgtgttccttgatggggtctgtttttccagggtcttgaggagtggccctttccacccagtttggctgcggggctgagaaggtgcccttgcattttgtattgtgtgtccgtggtgggtctgtgcctcccttctgtctgttttccctcaggaccacccaccgccccatgcttgtatctacaacagctatgaggaagaacatacagattaatcaccctgctgcgggatgccagctacccagtggctctggcagccccagtcaatggatcctgcagtgtagccttcatcagtagagctgccactgccagcacccaaaaggtagcactaatatgcatgtgtgacctgaaaattacaatgtaaatggtggggcaacacatgtataggaaggtaaattttaattaaaagtctgttctccaactcagcctgcctttaaagatacagaaatgccaagctgtcaggctgccggtcgggttaagagggttctctcgtgcactgtggaccaagctgggagaactagggcttcattgaaatcggatgcctttgactaattatgcaccaaatgcatcccatatggggaagatatgccctcaggtggttagcagagccagcaggagccaagcttcctgaaaaatgctgggtcttctctcctgcagtgtcagggggtgcagacagtacagagggagggtatgagagtcgaggcacatgccaaaaaggagcaggtgggaaaaaagagcccatggcccagcagcaaattgtgtgtctttgagtggatgtggcttttgaggcactatgcccaatagtcatcctgaatttccttcactgcctggggagggggtggatggaggagggaaactagccacctccagaggcaaccctgctggacaaaactcacttttagaaccatcagaagcccattttcctgtggaaatctacggggaagagatagagaagagctgcagagtctattaaatgtgtgcttgctgcctggtctccggtatagtcaggaaatcagatttgtacagtggaaattcattcatgccacaaatatttattgagtgcctacactgtgctggtggtactagggactggggatacagcggtgggtgagataaaggcacgacgccctcaccgagacttgtgtgccactggagaacatggattaaaccaggcgttacgtgatcagtgtatcagtgccatatgggcaatgatccaagctgccgatgggtacacaccggggacacctagttcttaagtgactttttaggatcccaagtggtcagaacagcttccctattttgccatttacatgttcacattcacttagctcaagttacccttctgataagaggaaattcgcgtcaagtcacatagaatcactgaatatttgcacttggaggatcacctggcctaattcttctgctttacacatgcagatgctgaaggagagaagttaaagaacctgtccaaaatcgcacagctagttagtaataaagcttgggtggaattctgcttttctgactcccagattagtatttctttgactttacctcccctttggaaaaatgaagcgattcaggggaagttcctgggcatttatggccaaactgccctcgctctgaagattcaatgttttaattggcccggcagagctggagtccacaggtggtaagcatggacaggtggagagccagcatcagagagagcctcctggccagcgcctgccttgcttcacagatgtcaaggcaattggggattgggggcagggtatgataaagggcatcaggaaagtggcagtgctggggcactgtcctctgggcctccctgggctcagctgggcaggggcgtgttttcagagacaatggtgttgactccctctgggcagccctgcagggtggcagtcccacaacagaaatcttggagcagatatgttggaggatatgtataagaatgagggattagtgctggttgggggcagaaaaaatgccctcttggggagaaagaaatgatctgtgacaaaggacttcctttcctaaccaggcagactctggaagatgaccacgaggctgggtgggaaggtggcagtggaaacgtgattaattgtactgtccatggacagtgagccgaggagcttgtacctggctttattagagacatacactcggggctgctctacccagaatccctcctgctgcctccagggctgctccactctgtgtcttagagatgagaaaaggagtcaaggactcctaccagcgtggaatggtaacctctggaggggaggtaggtctcccagggatctgagacgtgttccaggaatggaattcccagtatccttggcagtcatttcaggatcttggggacctagggatgctgtctggactgctctaaaatagcccttctgtggcttcctcaaatgtattgtctgaatcagcagcttcaaagtgatatcagggggtttacagcatggatgttggagctatgtagactggattcaaatccccagttctaccaattccagctctgtgtgcagggcactagaacttgctgagtcctagctcctttgtaatatgaggtgatggtgaatatgtcgtagggttgttgcctggattgaaagtaggtaaagcacctactagcgtgtctggcacctgggaggtacttaaatggtaacccttattacaacaaaacaataaaaggtccttccttttaagccagaaaagttatttggaaatggaacagtcttttaatgacggggacttaaaatcccaaaccaccagccaaaacaatcaaaatggaacccagacggatatttgctcaagggcccctggcttctcaagggcctactccgccgcagaatttgcctgcaccacctactggtggtttcttagaactacacactctctttctcgactgctctttggtgagcaggacaccaggagaggcagggaggaaaggaaggtaactagtagttttgcaactgttttaattacttcaaattgagatgtttgtaaataagatgttagagtctggagcttttgttcggtcttgtgtttagcgtaaatatagttttattgaaactcgtcacagaagtaccctgcagtggagggcgcaggatttggctgtgacggagcagagctagaggccacttgcaaatggcagcgtttggaagtgcctgttctgggtagagcatccaggctgcttttgattggctgtttgtccctcccacgaagcaagaaaggtgaatgtaaccagcccactggaatcggtccttttgccattaacgtcacctctgtttactacgtgggaagagtgattcacatgcaggaagaagaccttttccagaaatcctccatcagctagaagaagagagagatcctaattagggagccatgccacatttcattctgagattttgtttggaagcatttttccaactgagaaggtaggaaagggtcgtttaagtttcccactgttctgttgggcttaatgacctgcccaggtctcaggctgctctgagctgagctgtcagtgagaccagcaggaggacatcactaggactggaaatagcgtggagtcaattgacagacagccatgaagcactactaagtgccaggccttgtgctggctcccggggaggcaaagaaacatagaacatgaccttggtccttaagaggttgagagtttagtagacaagagaagcctgtgctaaatctgtgtacaatagtgagtgaagcaagtgctgagtcctagtggacaggtccatcctcttgtggaatattggagaaggaagcatgcatgtgttcagttagacacagtttctgacctccaaggtgaaggttcaattccatgcacgtttattgtgtcccattttgtataaacagagcacgtttgttgatattctgaggtatttggagaaggacacagttgagtaccatttttcagccctttcacattgtgcagtacagaggtcaggagcactgtttcaggaatcagacagcccacgtttgaaacctccaggacttaccacctgtatgtccttggtcaagttatcaaacctctctacagcttcatgtatccaatcaacagacgtttactaaatactgtaccggcactggcaggcaggctagagggactgaagggatgtgcagaggttggtggagagggtgagcagggcagagactgagtgtgtctaaggaaagctgccagctttaggcggcctggggagcttctagttctcagccaatctcttccctgaatgggcagcctatgggtgaaggtccaagtggggatgtggctgtagtgtctcttcctgcctttctcccatgccctgcggcaccaggcccacactggagtgctggtgggagcctgcatgcctggttaaaggggcatgccagagagctttccgtaattgcgtcctttctttttttttttttctggtgtatttatgagttttaaaagccccttggcaacccaggaaattccatttccctctgcagctcatttataccttccttgatatatgcccaggcacaaacacttgtgtgtattatttggttgttcacggggaatcttgtaaaatctgaggccttagtgggtgcacttcaggcttgagggcaggagagggaaaggagcagaaggtgagaaggtaacctctggcaaggaaacggtaacacttttaaatctcctctgaagaccaaaagcaaaagaaatgggctcaacctgtagcataagtgtgctagaatagacacaagcaagtttttcctgatagatgtcaaatgcctttttgcctgttcacaataagcttttatacatatggccaattctcatctgactgggacaagatgcagggagtggaataaactaaatgtccagtgtgcgtaattggtgttgctataattaatatttttcagccctgtgactccatgaatgcctctaacacctagagcaggcttgtccatcccatgggccactggccacacgtggtccaggatggctttgaatgtggcccaacacaaatgcataaactttcataaaacagtatgagatttttcttgcatttatttttagctcaccagctatcactagtgttagtgtattttatgtatggcccaagacaattcttctccttccaatgtggcccagggaagccaaaagattgggcatccctggtctagagccttccacagtttgacctttagagtatcttgctttggcttattctttttcatatgtatgtacttcattttccaaaccatattatactcttatcatttttatttgtatccctaccacggcctaaaatagtgcctgaatatagtagacaataagtgtttgatgagtgactaatagataacagcagcttccagtgtctgccagtgcttacactataatttatcatttttttcttaaggtgacagagaactcttgtaataactctaatagcaagtcttcttttgtgctaatatattaattgaatcatttattaactttctaataatatgcaccagccactgtcaggcactagttattcaaaggaagacgagacacaaccctgaccagacatgaggggtgtttaccatccacctgggagatgggcatataatttaaaatgaaatatcgattggtaatatattaatgaagagtatatattcataatttaggacagaggaagtgctttttgcctggccttaaaggggagagtttcggggaggatgtatttgagcttcatcttaaagacgagcaggagtcagcgagaagacatggcagcggtggtgggtcctggcagaaggaagagcgtggcccatagcatgaggcacgggtacggttgtgcttggggagccctgaagaggcggctgctgaggaaggtggagctggaaacgtagattggagtcaaagcacgaaggccttgaataccctgggcagaagctgagcaggcagtcagaaaggccctgaggagactcggaagggtcacctggggcagtggagagtgaggggcgggggaggctggccaggaaccatcgcggtaggcctgatgtggtgggggaaagattcctcttgtgcgtgctgtcgggatacatcatggagcctgaagcatgccaagaaaccaagcaagggagcgtggcctcaggcttgccatccgagccatccaagccagaggaacccaagtacagctgcgggtgaaatggctttgttagttaatatgtaacatgtcgcctcaatattgagcatctctggcagccgctgggactgcgggcgcgttgttggtcacactgacccagacaagtagtcaaggcagctttcaccacagatcaagcaagagagttggcagtaggtggggcagggtggtctccgtctgtgtgcacatggtgctcagtgagtcacatctgctccagttgtgtaatctccgtggtcagtgaagcaatgctgtgcgcacagttctgtgttgtgcctctcccggggaaggggtgtatttggcctgtgccccaccctagccctccttcgtcttccctctttcaccacgtcttccggggctggcttgagtgtgggagtctttctgccagctccctgcctacagccgcccactcaccagcccttcatgtgtgcctctgagagtcttcttcctaaaccaccccgtgcccttcagtccccttgtgaagcctgggcagtgaacatccttaagcccttagcagcttccctgaatccactcctcgttatccttcaggagtcctcccatatggtcaagcagatgaattccttgtttcttattcatgtcatgccgcttctcacctctggcaaccccaactaacatgcccctccctcttttgtctttcaaggtttcattcaaaccaaacttccttcttgaagccttctgcaaccccatgcctctcagtgaaacgtccttccttactgtgcacatgagccctgtggcacgtgacaactgtgcctggataccccaatttctctttctaaggcagggaattttcttgtacttcctttagtcccagtacctagcagaattctaaaaaacagccattcagtgaatgtgtattgatatcaatgattctggcacagctgacggggccaaataaatgctaagtagtattaagagtgataatggtttttaagtaataacaatacctaccatttattcattgcaatgggttggtcacagtgctagacccgttacaaccatcatatgattgaatacagcgtaaccaacctgtgtcttggcattacttccattttgcaggtaagaagtgacataccttgaccaaggtcatgtggctagtaagtggcaaatgtggaagtgggccagtgttctgcttcttggcccacactcccaacctctcaacatgtgtcctctgccatagctgcatctcccagatcgcatgggattttttcattgttttgtttttgtgaccacgttgcttccttatccctgtgattgggttttgcccatgtctctcctatgagagcagccttggtaagaagcagggagaatggaagggatatcacatgccagaatggtcagaaaaatgaggttgctcagcaggtgtcataagaacggatgattcatgcactgtgccttagagtaaagatggagaaatgcaaagggagtggggagcagagagacgctgacagatgatgagtgagcacaaatgtttatccatgctaatggagtggggacgtgatagtcactctgttctaatgcttatgaggagcagtctgtgggctgcaaatgcaggagcacaaggaatcttcaccctagtggcaggggaacctaaaactccaggctgcaaacagtggctggagcatctctgtaacagtctggccttgcagatccaaaagacaggtcatagacaacaaagacatctgatatttcctgacactgccatcctctgggctctgggggagtccaagatcatttgcagcactgccctgggagtggtgacaggctggaggaaaattactggggtctgaaggagtgcaggcccagctttcctcttgcttctaaggccaacccaaacaaataattggtgctgctttcagaatatcctcacatgggaccaccaccacctccactaggctctctgtccccagccttctgccttaggcttttccacctcacactacactatctaaattctctaccgtagagccaaggagtgaggataagggaaagggaagccaggggttctaagggaaccaaagtagtaccaaattcccccgttggtctgtggtctaacagtacggaaatggatagccatctgcatggggtggaaatgtctcttctttgtaaatgttccactgcctgagatttcaccattctagctttactttgcttccattattccacagtttccaggggaagagaaaactttacctggctaacaccttgatcagaatcacttcatcacagatcatatacatccacagagatgactgaggaaacagagaagagcttagaaagccaactctgtcttcatcaccttttggtcttggtcctcctgccttgggggtataaccctctcttagtttgtgggagaaaaatatccatggtaagaagaaagatgtcaggtccaggacagcaaagaaaccgctcagtaatagaagcaactccgattgcatgagcaggcttctcgagtgctgtcctgtcagcctaccgtccacattcctggtgtcatcaactctctagggacaggagcacagaacacgtgggagccgtcactgcaggagctgtgttagtgacagcagcattcaccagaggcatttaaaggctgattgttttatccatagcattgtctgggctttgagagagaaatcctgcctgcaacaggagaagactgaaaaatagaaaaccattggcagtatcaaagggttgtcattagtggacaagtacactggcttgattcactagtgctgttattatggttgttattttaatttgtcaagagacaatgggttgttggagaacatgggcagtggcccttgcttccaaggaggaaaggcaaagggaagagagatgctagggggtcgtttctgtagaaagcagacgcccaggtgtgtattttccccaccactgctgagccccacagcatggcttgtgaattttacaagtgatactgtgacatcgaaagcattccattgcgtctttgtgagaatctagggtcctcttttatgcttagtctaagtatctacagataaacatgcatctatattatatatgtgtgtgtttctccatactctgtgcatatacttaagtctgtaatgtgcatatacgtgtatctgtctgaacagttggatatatatagatgtgttgcagctctccaacctttaccaaagaaacaaaaaaaaacctaaaaccacacacacacacacgtgtgcacatgcaaataaataaatagagaaggagaaggaagaaaagaaaacagccagaggaggttgctttttctgtttcagaggacctcagcagttcttcccaaaatagacttctgtccttgctgggtaacatctaaaggagacgacatcacagagggtccaggcaagggctgtggagtccgacagtggggttcaaatactcacatgtgctgttgtgcttggtgcggcaactcaacttctcaaagcctcagtttccccatctgaggaagagggacagtccttcctgggaagagcaccctgccctccccatgacaagtgctcagcaatagtctcagccttctttcacaaggaacacaattgctcatcctatagttacagctcaagtttacaacgcaagcatctctcaggtgacagggtctttttttttagacagagtctcgctctgttgccaggctggagtgcagtggcacaatctcggctcaccgcaacctctgcctccaggattcaagcgattcttgtgccttagcctcccaagtagctgggattacaggcacgcaccaccacactcagctaatttttgtatttttagtagagacaggattttaccatgttggccaagatggtctccatctcctgaccttgtgatctgcccgcctcggcctcccagagtgctgggattacaggcatgagccaccgtgcctggccaggtgacagggtcttaacatggaggctttcaggacagatttggtttatgtctgccctggcattcagaaggtgacaagtggagcccggaaggctttcggactaacttctgtaggcccgtgccctctatggccgcagaattggcttcttgttccatgttgctgctagtgctttttgtggccccagccaagtcggttcctatctttggaccacagtggacccatcgaggggctctctggagtcctcccagcccacccttctgtgcctggccactccaatcttgcaggacactgtgctggaaactgacttcaagagtaacactgttgtggctcccacctccggggacttcataggtttgagtatgtgtgtgggaatgtggtctgttttatttactcttgctaatgaggctgaacggagctagtgagggcattaaaacattttagtgttattagttttaaaattagcccgagctgttaaggagagtccctgctcactttgcttatgtgagaaaggggcttctgaatgccaaggttgaatgcccagtgtctttcatcctaaaaaagacaactttatgcgctatgcgttagaatgaacagggaaactttaaatataatgatatggggtgcctgggccccacctcctcctttgcttcactggccctccctggacatcagggggtgtggtttttgcttttttgttttttaagttttccaagtggttctcgtgcagccaaggttgaggcccaccgggctaaactaaaaacgttttccggtgtatgtgggaggcaggtaggagggagggctggcgtgctgcccagctgtgtaccatttcctgcttggtggatgctcagggagtgtttgccagagagctctcatcggatgcttggcatggctagttcagatgctatggacagaggggttcctgtgggaccagtgcttctcagtcctgaaatcatgatcagaatccccccatgatctttgagaaaatacagattcctaggcctcatccacattggccggaacagaacctctgagggtaggaatgaagaatctgttattcctgttattcttaggaatagtgaagcttcccagaagatgcttttgattcagaaaccaccgaaaggggaaaacttgatcctcaattcctaggagtgaagattttacattttccttttggtcatctgatggccctagggttcactagataggccacttactcaccatgtgacccggacaaggcattcagcctctctaagcctcaatgtcatcatttgtaaaatgagagccataatggtttctgcttcctaagagtgtttcgaggattaaatgaggtaatatgcgtgtttggcacattgtagatactcagtgtgttcactgccatcatcatcatcagcactatcattttgtaactcagatagaagctacacactgtaagagcaatttctaagatttaaagagaatgaagtaaaaaattctggctgtgaagtctgaggcaaatctagaggctagtgggggtaaattggttttaaacttgtatctgaaccagaagcttctctggagagagttggagtaagatcacacaggtaatcctcaagacctgtttgttaagagtacaaagccataattgggaaaacagtgaggtcccgattgtcatccagaatgaattaatttacatgcacttatggagtgcctcctgtttgctcagctttgtgcttggtggcatcacatataaaaaggaccaggccgggcacggcgggcggctcatgcctgtaatcccagcactttggaaggctgattgcaggtggatcacttgaatctaggagtttgagaccagcctgggcaacatggtgaaatcctgtctctactaaaaataaaaaaaaaaaattagctgggcgtggtggcatgcacctgttgttctagctacttgggaggctgaggtgggagaatgacctgagcctggaaagtggaggctgcaatgagctgtgatcgcaccactgcactccagcctggtgacagagtgagaccttctctaaaaaaataataataatacatgaaaaggactggattcctttctttcagggaattggccgtctggtctgggaagtacaattagctccctttgaagaacaggagcaggacgagaggatgtgtaattaagtgctaaattgtgtcactaggactctccagggctagatgattcaaggatggcaacacaatgagccatggaggtggctgggggagcctgttgggagagtagggagggatctggagcaggaaactacaagcaaatccaaagagatatccaaggagggtcctgggacaagagtgacggctgagatggggatgacgagcagctgccctacctggatggaaggtgagggtccctgttgtcctggagctgcacagccacttataactggggtcatctgggtctgtggccccctgacagctggtggtagtctgcaggcatacactccgtgtcctgtcgtgagccggtcctcagggcggcatctgcccaggaagccacaggcacacttagcacggcccaagagcactatctgcaggaggcgcttggccccagggctgagctgatggtggttgggtggggtgtaggcgacaggagagcaggtggcctccttcctctgtgccatcgcttagagggtatcggtagaaccctctgtcccagaagtcagctccgtatctgtgggtcttaaaaaccttctgatcctgtaaaatgacatttacaagaatgattagaccttaaattctgtgatcaggcaaggtcttaatttggggccagcagtttagcacagaggcagggcagaatttcgcacagaaggtacctgatccgtgatttgccccggaggtgaaaatgagcaaggttctgttagttaaatgagcataagaaatgcagcagcctcatccgccccccgccaccccaccagagagtcacaaagacgctcattggcattttaaaggctcagagaagtcctgcagaagaagtcctctttagagccctatgtggcctgcaaactgtcttgaccacagtacccttctcacatagtccctgtgaatgttctgggcgacctgtgacccagcctgatctcctttggaaaaaactggagtgatgaggtcctgccagactgagcctgaaggagccttccatctgcctgttcattttccaagccccagactctgaaaggagattcccaagttccccagcctggccctgcagtggtggggagcctcagatcccaggtctggtttaatgttccttagttgttaaccagctggaattaaggctgagaggagactcgtgggcaggctttgcaattgaatgaactatcagtgtggttgcgaggctattttgaagacattttagattgtttctggttcagtaatcttacaaaaagtatgatccaactgatttattaggaaacaatttgtaaactttggttcacttacaagaaagaagtgtttgggtttttgaaaaagatactgcttttgaggctggctgattttcgtgactgactagtgtttatgaactgaaatctggctgcctctgccactcagtgagcctcgcacagtgaattcctagcctgaggcctcattcttgctattaacccattcgccattctctcccactgctgggactttcggatggaggatgcctggcctgtgtgttggcaggagcagaggctgacgtcaggaacataaggtcatgccataattgctgtgccccctgccacccccgccgcctctgcttgctagtgccaggctgcccaagtgctgagaatgccaaggtcactcttccaaaggaggcaggaggcagccgtagcgtcagtcccttgcctcgtccatactgcccatcttcttccaaaggcaccaattattggaagttcctccccttgtggctctggcctctgggacgcctggggacatttccactttgctgggaggggagtgtcctccgggcccctcggatgctccaccagtgagccagggcttgggatgggtagcgtgccaacagggagtggccacttacctttgctcctgtatgtgccctgtccttagaggggtttaaatacatcaatagcttattcgccaaaatgtatccagaactatttttagtgctttgaacatgttgactcttacataacattcattcagtatatataaactattcagtaaatattccctcatgagaagaatggtattttggtctattttgtctctctgccctctgtgttctaatttgggaccagggagcctctcggctccatcctggggttggccgctcccagacctcactcctgctttggctgggcttgctgccttggccatggtgaggggctcttgcggccccgggaggggggcctggtaaatgcagagcctgcatcacagcaacaagtggggagcccaagagcagggtgcagagctcctccttctcccaggacggaggcgggaaaccggccgtgggagcttccctggtcgggaccatgttcccagtccagagggatgtggttgcatgctggagccgctagtatggactcgtgaatgtggcttccggtcacaaaagtgccttccaggtgggaaaatgagtgaggaaacctggattcatttgctgaggtgctgtggcagagcactgcagactgggtggcttgcacaagagaaacaggtttcttctcaggcgggaggctggaggctggagatctgagatcaaggtggtgcagggttgccttctccctggcttctccatgggtcctcacatggtatccctctgtgcgtccgtgttcacacttcccctttctacaaagacgccattcatgttggataggatccgccctcatgccctcattttaacttaacctcttttaataccctacccctaggccagtgcagtggctcacacccgtaaccccagcacttttggaggctgagatgggaggatcacttgagaccaggagttcgcgaccagcccgggtaacacagggagaccctgtctgtacaaaaaaaaacaaacaaaatagtatgctacctctaaataccatcacacattctgaggtgctaggggtgagggctttcgcacatgagctttggtggggacacattcagcccatagctgaatgtccatgcttctgtctaacgggcaaggctgctctgcaaggctgtgcggagtgggcgccgggtggaactccaggggaggcacctcagtctgatgtccaaggaggccccctgtggacgggcctggcccagaaaacctgtgtgtttcccacaggtttggggagatgagttgttctggggtagagacaggtcttgtttgactttgcaccccagttcgtatctgcacatggtgagcgctggcttggcgtctggtgtggagtggtggagagagattgtggaggcacttcttgcagatggcccctgcctctttcctggtgagatgtgggcttttcttaagaaagctgcaacatgtgccccaggagatacttgggctcccttgcccggggtgcacaggacggagcagggaccatttgctgtgtcttctgtcagatctctgagggatgtccctcaggggctgtgaactctggtggaaagtgaaaaagtcccagggtggattccagtgggctgccagccgggcgtgtgtgtgaggcgaggtggagggcttgaggaggtgcacggccccagaagaaagctggagggcggtccagcctaggacacgctttgggcttgcagttcctttccttccttcagggtcaggcttcaccaagcaagccaagggtccctctcacagcagcgacagcagcaacataaatagcactgatatccaacccggcaccgaggcagatcccctaccaccagcttgttctgagagcgtgaaatcacctccatcctgacacgtttgtccccctgtgcttttgctgtgccacctcccgagcagggctggattaactggataaagctggaagagtaagtgccagctccatgacctggccccagggcaggcagcccctgcctcctcctctctgtaaaggcacagagagcgggttgctccaccggccacaaagcacattcccaggaggctctgggcacatccaggcctccttgagggccagccctctgcaccacacaggtagatcccttcctgctaggacagccagttgtttctaaatttaaaaaatgctccttgcatccaaatgcaagagctaaggtgaggtttgctgggcatcaacacctgggcacaaagaacaggtctcaggcagggcaggcagggtgagcagagggtttgggtgagaaaagccgccatgcccgggggctttatgtttttacagagctttcatttctaatgtgacgttaaattcttccctagttgaacacttctcttggtggctggctggcagctgtgtgcgggtgtttgcaggatgataactgcctcagcatccatgccatcctgagctgctgggaggactgctgggcagagactccttggcaggggctctgggaggcatctgaatatccatcttccctgatctcctgtcctgcacacagatgcacacactgcagggctatttctttattcagtttggttttgcttttgccccctagccctccctgtgcccagtacctgggtctaggaacatagaatttaaaagctggggcagattctgagagctcttatttcagtctcatcactttacttgggaggaagctgaggaccagagatgttgagacatgttcttaggacaaagcaaagtttatggtgcagcctcaggtggagcccaggtcccctggctcccagcctggtgctccttcccctggatgacagcatatctgtccttctgttgatttgtcctacctggggtgttttccccatcctcatgtccttcttcagctggacatatttgtggaggtccagacacaactcagtctgggtcatttcttccccacccctcaaaaaacaggttgctcaaggcagatgcagagggtatgcctgtagtcccagctctttgggaggctgaggtgggaggatcacttgagaacaggaattagagaccagcctaggcaacatagtgagaccccattgcttaaaaaatttaaaaattagctggccatggtggtgcatgcctataatcccagctactcagaaggctgaggccagaggatcacttgaacctagaaagtggaggctgcagtgagctgtgattgcaccactgcatgccaccctgggtgacatagcaagactttgtctcttaaaaacaaaacccagattactagtgaggccaaattgtgatataaggtttgtaatagagacacttttttaaggctgaccatgtgccaggccctatttaaatatattactcatattagctcatgtaatcctcatatcgaccttctccactttacagttgaagaaacgaaggcaccaagaggtaaggaacttgccagaagttatgcagctgagggtagtggagccaggatttgagcccaggcagcctcactgcagtccttgagttcctaacctcagatgcctctcctctgaggggagccctgctgtgctgctcatcctgttgagtgacagcctgctaggatgtgaaggggacattggatacttccggaagctgtggtttgactgtgcagatggttgtttctcaggctctggtccatggtgggaagcagtgagtgagcagatcagcccaccttcagcctgtgcgctctgccgtctgacaccttccaccctcagggcctgatcacaggccagcaggcagctgggggccctcttgggtcctctgtcttctcctgagatctctcagagacagcagagaaacgagagaccctggaaatgcctcatagctagtttgaatcctagcacttacacagtcataaagttaagtccttgtggtcttttatcctgtagaatagaaaattaaagggaaaaggtcctaaaaagaattcctcctctgcctgtcccgtcttgcccaaatcctcagaatgtcaatctttccccaaactctgcacactcttcaagcacttcagaaactaatactttggtatatcccaaattgactttcaaagaacgctggataaaattttcttgtaaaaagggtatgttagtcaaaaaaagtttgagacacactggcttaaagtcacgctaaacaagttgatgtgccacaggatttctcaggatctttgatatgcaaatgtccttgggaggcagagctaatccgcagtttggtagaagctgagccccttcccctccatctcacatacaaatgaggaagtgttttcaaggcctgtttgcactgccagtggctgtcatagcaaactagtagcgtccattggctgtcaggaattatgctgttggcacttccccagccccgtgactagccttagaggaaatcaggacccccctcaccaaaaccagagcccactcttagccacctgccatggtctcagctgaagccatgaggcacccctgccagccagttcttcacacctcttcttgggcctgctgttgacttccctcctgtcagctcctgggttgtacccttgggatgtgcaaagctgcaaatctgacctggacgttaggtcattggcccagaggactcagagttgtgttctttggtcctctgggatccagtagggcttcctgcttcactttcatctgctttctctacccagggtctgagaaaagtttctttggcaaaagcatttcattgccaaaaagaaaatctgaaagctgctgatgtagtttaacctcctttatttaacagttgaggcaaattaaggctccaagatgctgagacctgtacaggatcacacagctccttggaagcagctgagccaggactagcacccagctccctgcttcccagtactcatggtctttcggctgcatagctctacttctctgcaaagggtgctggggccgagattcatggcctttaactatggttcttaaatgttactgtgccgcagacccacccagggcactttgtaaaaattacagaatcatccatcttgaagggccagggtcttgggaaagttgcttcatcttttgaggctctagatggagtgttctttctgcgctgctgaacctggagcactgagaagcttttcctgctctcaggtgcatttgaatttgcatggtctgttttacagggcaggaggtgcaaattcctattgcttaagcccacttacataacaaactggccacaccttcaattccaaaaggcaatgcggctgcccactattgcagactatgaaaagtaaggtagaaacaaactctgggagccacagaggctactcttcatggacttatttaaaaggaagacctctggctctttccccagagattatgatttaggaggtctggggtggaagacaagaatctgcattttaaccagcacaccctcttcccacctccacccatgtggttttgatgcagttcatccttggactacacttggagaaatactgacttacatagtaaagaaccaaaactgtgtaattataggaatcactcaaacacccacatgctaggatatgaggctagaaattcaggtttatgattgtccaagtgggttagagaaagaagcaaggcatcttgatttttaatgtggataacatgtagcacaatgatatcatcctgataatctttttaaaattttttttgttattgagatgtatgaatatattatatattttggatattaaccccttatcagatatatggcttgcaaatattttcttacatttaaatctttaatccattttgagttgatttttgtttatggtgtgagataagggttcaacagccagttttctcagcaccatttattgatgagactatcctttctccattgtgtattcttagcacccttgtcaaagattagttaaccatatatgcatgggtttatttctatggtctctattctgtcattggtctatgtgtcttgtttttgtgccagtaccataccattttgattactatagctttgtagtacagtctgaaatcaggaagtgtgatgcctccagcttcgttcttctttctcaagagtgctttggctattcaggcaaataacctgatggaaaaatgggcaaaggacctgaaaagacatttttctaaagaagacatgcaaatgcccaacaggcatattgaaggtactcaaccttactgatcaccagggaaatgcaaatcaaaaccccacacctgtcagaatggctatcaaaaagacaagcaatgacaagtattgatgaggatatgaaaacaagggaatcctgcagggtacactgccagtgggaatgaaaattggtacagccattatggaaaacaacatggaggctcctcaaaaaaatgaaaatagaactaaccataggatccagaaagtccacttctgggtgtatatctaaaggaaatgaaatctgtgtttctaagagatatttgcacccccatgttcattgcagcattattcacaatagccaagatattgaaacaacctgagtgttagctggcagatgaataaagaaaatgtgattttctatatataatggaatattattcagtcttaaaaaagaaggaaatcctgccctttgcaacagtgtggatgaacccagaggacactatgctaagtgaaataaaccagacacagagggataaacactgtgtgatctcaattgtatgtggaatctaaaagagcccaactcatagaagcagagagtagaacatgtgttgccagggctaaaggggcttgggggaagaggtaatgggagatggggaagggttataaacttggcaatctaatgtacagcatggtgactgtaattaaaaatactatgctgtatatttgaaatttgctaagaaagtagatcttaaggcctatgacaccacacacacacacatacacacacacacacacacacacagagggaactgtgttattcagctctattgtggtaatcatttcacagtgtacacataaatcatcatgttgtacaccttaaatatatacaattttttaatttgtcagttatacctcaataaagctgggtaaaactgtaaactatagctatatttaaactacaaaactgtaaaaatataaataaaagtaaataagaagaaagtattaagcatcgccttgcagggggcattgtgagtactgtactgcatatgcctgcagcaatctgcacagatatggcccctgccttctggcgacttacagtccaggagggaagaaatgaggaagtggagcagcgaaacaccaagtagcaaatgctgtggaggagacagctggatcctagtcagccggggaactgcatgagtttccgaggtttcttaaaggtctgtatggtatctctcaccctctagcattttcagcagggagcagtctggtaacaccctagtactacctgtagtcagagacctggtggcctggaagtctataagatctatgtttaaatctttctgtctggtccgcagagctgctcagctcactggttggctacgaagcggaacacttgccatacaaagccctctgcgatgattagctcatttaaccctttaacaaccccatcagataagtagtattattacacacaaggaaactgaggtgctcggagaggctacataactgaacccaagtcagggaccccaactcaggtttgtttgactccagggcctacattctattcccttcagttccctcaacaggaaagatggggcaacatcctgtcctgtcctctgcctcccagttaaaaaaaaaaatatatatatatatatatatgtatgggaataaagacttcttgatgtgtatcaccaacatatctaatttggttttgaatgtgggggaggcaaaatgacattgacagataataggacttacatgaaattctggtttgtttagagatgctataaagagcttggcattgtcgactcatttggaaattcgacttccaaaggagcaaatgcaaagtatttctcaagccccagccctccatttttagatctgaagagggaaacaacaaggtaggtaactgaaagtctggagttgtttctatttagttgttcctaaaggcagggggatggactagaggaaacctgcaagggctttcgactcacagggttctttcattctgtgggcaccagttctctgggcatgagagatgccaaggagctggtgtgttttggagagctcatgctctgaagcacatcagaagaaccaatggttgccgcaagacccccttcctaatgcagatggagttttctgtgaatcccggaaggtgcacttgggtgggagggagttgaggggtagaaaaaggaagacagcccctacgttcagcagaacccagggctgatgtctgcaacagcataaagtgccttctagagtctaatcctggtcatccgtgtagcatctcttcttctctaaaccctcatcctaggctttctttcacgcttatggccacacacagtgaggctttcctctctgcccggaatccacagggcatcacccttcctctggagccagcttggggctttcctgacgtcagtagttttgggggaagccagtgtcacctcatctctgtcttgaagcatatttaactttcccaaatagcaaactctggttctttgagcaaatgacttccagatgctggaagcagcggctagtggaattttattgcccccaaactgtggttctgggctgcatacttctgacatgaaggtaatttggaatgtaaacattgcaagacgtgtgctggaattaattaaagcagccctgtattctctaaggcctgcaagcctgcaattaactgtttacattaacaccaagccaagcagatcaaccagaggatgcagggacccttgattttcactttctccctttaccttcagaaaacagtgaaacgggaaccaagctgacccatttccacagtcccaacctgagaagaggctgcttaagccatcctctctcgcacagcaaacaggcgacagcgtgagaagcctaactgggcatcacggggaaccaagggcaggcaggaacctcttccgcgatatgtcagacgtcagaggcttctttagccagaaatacaagtgtgcccttaaacacgaatggccacattcatggtgggcctgcagagaaaaaccgtggcatctcatacttgcctgataaaactagaaacagcttttgagaataattttgtaacttcatcatggcatttaaaagtagcatgaaagttttggagcaggatggtgatgatgattgcataataacgtgaatatacttaatgccaccgaactgtaaacttaaaaatggttaacatagtaaattttgtgttatgtatattttatcccccaaataaaagagcagggtgttcagactataaaggctctttgggattatgtaaactaggagaacccctggaatagtcctcatttatttcccccacgtaatacaagagggtgaagttctggcttcctgggaacaggcccacacaatgtcaggatatttcagggcatttatgtaaaacaccagaaacccatgcccctggagctgaccaatccttcacacccgctccgagtttgttagaggggtgactcttttggcagggagcactgagaaatgctgatatgtggttgccttcactattggctgtaactatgaaaagagttgctggaggctacctacttaccctctctcccccaaaggagaaagacttcagtatcctgcagcgtggcagtggggcaggcgtgcgggtgtgcacatgcgagctgttctgttgttgagactctagttgttgccggttcctccctctttatatgaagcaaggcaacacccacaacaaagcactgtaatctctccattgaccatccttctgccctcagatcaacacaagggccaattccattccaacagcattatacgactttgaaaatactctttgtgtcccgccagaacctcctcctcttctcttcagtttcttcctcatatgacacagcttccagaccctaaccaccctgggtgtctgctttgggtgtacagtagtttttcaggataatgcccagaactaaacccaatactaatagtggtctgctcagagaggggtatgggaattttatcatctgttctgttttgacttccatatgtccaacattatcccccaatgttgcatttcaaccgtcataccatcctttccttaaaaaagcttgtgatcatctgaagcctcagggattttttttttacatgaatgactgttgagcaagggctccccagtcctgaaattaggtaaatttatttaacttaaactcagaaatttactagaaatcttattcattatgttaaaatcagggcctttgatatccagatactgagtcctgactccctcacccactgtccttccctagctttgggtgtgtctatgtcttcatctgagttagaattctatatagcagaacttgattgaaatgctgtacagaattggcctgggagtacagagaccaccttttcagtttatatcaatcagagtcatgtgggtgtggtaaggccgccctgagtccacccagccaccaccatccagcttgggcttctccactttgctcccaaggattgatggagagtgtgcgaggactggttaaagagatgtatgctgtgatagacagggcaggctagcagggggatgtggtgcctggcatgtggcaggcatccactacattctgcgggctgagatggtcaaggtcatccctagcctccttgcaggtgatcattcagacttaacttcctccccacccaaaaagttgcctcaaaactgctcacaaagtgggggctttgagtttaatttctcctggagccctctggtaggacacgaatcagcaggaaactggcttgcaggtctttggaaagagaagtagcctaagattaagggcctagaaaatcccccagaaaaaaagagcattcctataatcagtgaggataaactaaatgacagtttgggacaacatttggtttccttggttcatttaaaacattgattcagagattggggactggcttttcctgacttaaaagcagtggagccctttccctctaatgtggacacatgctggttccctccctgccttagggaaggagtcggtcaggttggagctaagagggcccgggagggtctttcttggtgaagcagcattagccattggttgagactgaggcagacagggttttagctgaaaaggcttttatcgctttttatctattgacactttttcaattaaggagtctcccctgagatgatctatcgcctccctgtctgagcaggaaataattaccagcaaagcagctccatcacctgccgcatgttttcccatggccagggaggctcaggaaaatatcaacagcctgcctgctgctggcggtgcctatgtgggcacagggcacacggcctttccagatggcccagccctttcctctgtcttatcctcccccccacttcttattccctttgaccaaggtttttatattataccctgtcaccatcagggaatctagccacgtcaccttctctcctgggcacctgctcttctgaggagcttgcagccttctaggctgggtccatgcctcctcttgttccagggccccctatactgctcatatattcagatgcccagggacatgttccagcggaggctacccaggataacatttctatctcactgaggtttttttggagccttcaaaattccatgatctgatattttaaagtaaaagctttaaatataaatgtcattgaggtacagcacacagacggcaaaatgcaaacattgtgagtgcacagcatgaattctcacctcgtgcacacggctgtgtcgccagcacccgggtcaagacacagaacgttactcacacctctcgtgccccaactagtcactgcctcccttccccaggaaccactgccctgactcctaaatggcatagatccatttcccctcttgttgtacttgatataaactcatgaagtctatatttttgtctagatttcttgactcagaatcatgttcatgagattcatccatgcctgtagttttaaagttgttcatgttcatcggtgtatagtattccattgttcatgttcatcagtgtatagtgttccattgtacaagtgtgccacggtgtttctacccattctgtcattgatggatattttctgtctttttttaatggagaacatatgcatgtactttaattacctgtaatgcctaggagtagaattgctgggttgtagggtgtgtgcctatgtttagctcaattattgccagttttacaaagtggttttgcaactgagaagttttttcaatgtagaaaatgtgagaacatttatctcctcagcccctgccgacttgcctttatgaaagaaaacacagaggtggggacttgtgcaaggtgaggactgctatttcttgattcctggcctagttgcctttctattagcctgcaaggaacctctcttttgacggacatgagagaaaaggacacgtcctcctctctcccgggtcacactttcccccaacccattctatagctcatataattttccacaaagtgccttatttgaacttcaaatcttcaaggccagatgagcaccacagacgtggccttttcttgtttatccagagggtttggggaagcacagctccctgacattcattgatggatatcatctgcaaccgtctgctttccttttgtgccaacaatctgggcacgagagagagatgagtgtttgcttgagattgaatttatgacaacacggaaccagcctccatcagctagactgatgaatgcctgggtgaacatgccacagtttgtgttttttccccttctagtcgccacctttcttgattaggaagctgtgttgtcagtgtgctgacttattagggagaagaatgggctctagcaggcctttaaccatcacagttctcattcaggaaagaaacgaaggcaggtgttgtacgccccgtgcctcccacagagtcccgcaagctgtgagtgtcctcaaaccatccatccatcctcccttgaagggcttgggggaaggggtgtaaaagggaagaaaaaaccctattaattgtacgcacattaagttctaggcactattttaggtgcgtgtgtacaatttccggagcaaatgagtgaatgaatgattagttttaaaatacaattaagagttttgctggcttccccagaacagaaattttctgagacttttcctagatcacttttagcagtaagagtgccctaagaataatggctttttggtcaaagtctcttaatgtcactgaagcttgggaacatgttctcatcgggcaagagaacaacaacagaaaggaactgcattccagttccttgtgtataaaggtgctcctgacctctttggccccaactctaagggtaagaataaccataagttattgccagagggcagcaccttcatggacagagagcaggtgtttgagggtcccatgctccacccaggaagctgctggctccactaagagaatgggctttgggcctgttcagtttctaccaatgtggggcaggcccccaaagctgaacatagatggagacacagaagggcagaacagttaaaaatttaattccacctttgccatctcttatctgtatggtcttgagaaagtgcctgtgtttctgtgagaccttggtttccacatctgtaaaatggggagaatcatacctcccttattgggttgttatgaggattaaatcagtcagtgtatgtaatgtgcagggcatgtggtaaacgttcaagagtgtaggctttttgttattggagaaaacatttgtcaggtatctactgtatgcagacagaggccagacatgccttcaggtacctgcttcatgcacagctgaagctgacacatagtgctcagttagttacttgagactttgctttagctgacaaggaaagcccttggtcatcctgtataccgtgccaggcttggtctcatgaataggtggaatagcatgtatatggtcactgagtttcagtggagaccccaatggccaaaaagagaaatcccacctttcttgttgatgcccaaacaccatgaactcattagttcaccaacagaaaactcccaagtatctgctgaagttagggcttgtgctggcagcctgcgtgactgtgcgggtgtgtcctatgaagagctgatttgcagtggagacccatgtgcacaggcacaaaaagatggccagggacctcggggagaatgcggacactaccggctgactgctggtgagacttggactgaatgagaatactcatgccaagcacccagcatagtgcctgaaacataaaaggaaattatctcagacctactaggattttcttattaaacaaaacaaaacagaaagcagaaaacaagtggtggcatggatgtggacagattggaaccgttgggcattgctagtgggaatataaaattgtatcatttagaaaaatggtgtggtgtttccttaaaaaattacaaatataattctcataccatctaacaattccacttttgggtatgcaccctaaagaattgaaagcagggcctcaaagagatattcgcacacccatgttcgtggtagcatcactcacaaaagccaaaacgtgagagaaacccaagtgtccttggacagatgaatggataagcaaaatgtgaaatgtgattgcaagctttaaaaaggaatgaaattctgatccatgctgcaacatggatgaacctcgaggacatgacgcgaagagaaattagccagtcacaaaagacaaattctgcatgactctatttgtatgaagtgcctagagtaatggaatttatagagatgggaagcaggatgacggttttcaggggctgaagggagtggggaatggggagctattgaaggagtacagagtttcagttttgcaagatgaaaagccttctggagatcagttgcagagcaatttgagtgtatataacactcctgaaccacatacttatacatggttaagatggcaaattttaatgtattttcccacaatttttaaaaataattaaaaatttaaaaacacaaaaggaactcaaatgaatacttgctgtatctgaatccagatgaacagaagaaatccctccaagcactgtggccctgcgcaggccagaggctctggtggcgattggatgtgggaacacagtctgggtggagaggagatttcaggagagaagaggaaacggcgccatctccttcatttcataatcacactgaaagcagccctgggagaggtgaggatgcagtggcttgatctcatcctaaggaataaataactggcatcacattttaattagtggagaagctccgggagccaggcctgaggaagtgcgccttctgccggtgctcagaggcagacggggagagcagggggcgagccgagggtccaggacatttgaagggtggtgggtaggagtggtgctgcggatggcttggtctgaccggcccagggtttggaatagacagagtttttctcactcagttgacctagttgaccttcccctctgagaaaaattcgtgaggcatttaaagaatgatctttgcgccccttggcctgggcgctctccttctggggcgggaactcacaggatgagggagattttgttggagctgtggagtgtaattacaggcctgacaggtggcaagtcagagggaacatcttactctgcagccgctgaaacaatgattttaagcaaggcgacagcggagaattctccctattgtgcagggcaaccctgttgagccataagccagcaccacatccccagtaaaatcaatcccagtggtggaaggaggcctccatccgttggacctggcacccagcccacattgctcaagagctgtctctgggcctggtatatgctacgccctgtgctacgcttctgtaagcatatggctcctgccctcaaggggcgcagagtctagagaaggctctgctaagggtcccagaaatcagaggagtcaggctgagtgctgattcccagcttggaggagtttacagatcaccagacaggcaggcgccacacggcacctagaatagtgttgggcacggactaggtaccaaagaaagagaatggagggagagagggaaggagggagatggcatggggatggaggatgggaaatagggcagggagacagaaggtgggggacagggagtgcggggctagaggagcgggcagagagacagggaaggagggagggaggtggatggggagggttggatagaagagaatggagagagagaaggagagggaggagagcagggaaggaaggaaggcaggcagggagggaggcctactcctctaaatcctcaggaaaaggactgggaagctcagagttgagctccttttctgacaatagtggtgtttccaaggaccaatctttactctccagagtggggcttgtgagtctctcaccccagctgtttcctggggctgtgaagttcatcggctccttttcctaccccatcacctacctgtcacctgtcctgggcaggcaggggtccccacatatcactgcaccctcgtgggctcccctgccctgtcctggcagtgtacatgatgagcagcttacatgatgtgtagtgtacatgggggcggcgtgcatggtgggtggcctgtgggggcagcgtgcatgaaggcggcatgcatgggggtgccgtgcatggtgggcaacatacatgggggcagtgtgcttggtaggcagcgtacctgatgggtggcgtacatgggcagcgtacatgatggccagtgtacacgatgagcagccaccatgcatcaggaggaagagacctcgctcccacgccacagccccaggccccaggcccctgacaccctggctccgaacccccagcagccagcgggtgggttggattccagggtctccactcaggggcattgccgggtgagcctgagataagggtgtagctctgctcatttctggaggtctccacacaccctccgggcagacctcatcttcttcagacatttcttttactctttggcttgctcttgctgtgtattaaatttgatctggggtgtctgcaaatgttggtgctcacgggggtgtgctgggccgggagaggatgagcattcctcaagaagggagacagcagagcactagatgggaaggggctggaccctgaaagagcctgccaggtatccccttctagcaggaggggcccccagacatttcacttcattccttaggtgtgagtcatgttcacatttcagggaaaatgcacatccttcccagagctgaggaagccccatgagctattctggtcctgacaccggctcccaccctttaaagctcctgtccctgggggttttgctgcaggatggtctctgaagtctgcagccaagtatttcccttcccttcttagagggccacgtccctggcctcttctccagccccggggattcaggccattgggtgtgtcccctgcctgaggataagccacagtgttactgacctgggcccctgactccaaattgagcattagattgggtttccagtggttggtcagtgccatgaaaatcttggacttcaggtcctgtgggatccagctaccctcatcctaactccctcctttgactttattccaggctgacagagcagcctgcagttccaccctctatagctgcctcttggccttgcttttgtttaattcccatgtatttgttgaatatgtatgcatattttagcaaaaataaaaagtaagcagaacccaaataccaacacgtcctagtccatcaggtggcagtgtatgtgctctcagtctgagaaatatacacaagtcattaaatagcaattattgtaattagcagaatgtacacgtgattaatcaccctctgcccccgctcctccatttaccttgcctgtggcattagtggataccgtaaggggctgggagccagcttgtggtatagaggaaggagaaggggagggctggtttctctggggtttcttttctctctgggggtggatggttctttctgtgttactctggaccccctccaaggccacctcttctctcctccctttctctgtgacccatcccaaaacacggcttccctcaagaaaagctctctattaaatcagcagcttggaggtgtgcagtctcagccaggcattcaggccaaggcagctaggggtaggagcaggagacaaaaaggatgaggttcctgggtgcttggaaaccctcattccctgcacctatggctcggggatagtcacaggtcctgggtgacctgccagacaagctagaccatctacaaccctggggggcccagaggaggggcttccatcaccacacggatgctgcagcagcagctgtgtaaggcaatggatggctgaggctgcagcctataatcacgtatttacagttgctgcattatggaaaattaaaggtgtgtgaggcacagcctcttcagccaacagaggctgtctgcttgggctcagctcaggcagccagtgtcacctgcagctggaactgcttcaaatcctcctacctgtccaggggaggggctttttctggcttccaaggtggtcgttgggggggtgggggaagagcaggtgcctgtactcaccttggctcctcctttgttcctgggtgggatggatttgttctgttttctgtccacctgttagggcaacatagcttttggagtcccattttgagcaaggtgcattagcctggctcagttccttatctgtaaaatgggcacttgtacccatctcgtagggctgatgggatgattgaatgcaatactgcttagccttgtgtttacattaattagtttattaattctggtggtttgataaatattgagcacctacagtgtgtcaggatgaatgactctaggctctggggataaagcagtggctgagatacagcttgcatttagtggcatgtgtgagcatgtgtgtggggagaacaaacaactaagcaggtaaacaagtgaataaacaaggtaatttcatatagcactaggtgccatgaagaaggtaaagtcatatgggctgggaggtgcgggctctgagaaggtgacatttgagccgagacttgaatgaggatgaagtcctagccatgtgaagatctggaggagaagttgccaggcagagggaacagctcgtgcaaagtccttggggcaggaatgaatgaagtctgtgattatgttgtgatggcaactggttccttcctcgaaggtaaagtctggatcaagtttgcattaaatcccaaggtgacctggtggtatacatcagagaatcttccacctgggagtgaagggctgagttcttgggaggtgtcccagattagcctgatctatcagaactagacgcagctgctgaggctcattattgtgttcaatagccaaaactaatttatttatagggcattattaagaaatcgatttaatttgcactttgggtcaattgagttgcttcacacttgtgtgtgcacattgtttatctttacaagttattttccgtgcacatgtgcctgtgtgggtgatgaacaaggagaagtgcttgagagcccgggaaaggcacatctgcctacaaggtgaatcgggctgaatcacaggggcactggagccacccccagatgaagacatctattttcaatgaatgtagtaaagcttttcctaacttcagaagccagcaggtggactaagggctgggagggcccgagggcctgcccagcacattgactctggagactacgcattgtatattcctgccaccgtgggagactcccaatggccaccagtggtcatgatgcccgggcatgtgtggcgctgtacagtcatgaatcacttccatctgcacgatctgcaggctcagaacagccctatgagaaggcaagagagaaatcatcttctccattttacagatgaaaaatgaggctctgaaaccttagtggactgtccaggctagaaacgggaccctcccaaagtcaggtgttcctcccccttgcctccctctctcccttccttctgctcaccccaaatgctttgttgagccccttcttaccatgccgcgttgcacggcagttatgctgtggcattgccacctgccagcttgcctgggctcgaatttcagctctatcccatagcctgttgcatgagcatctgtctcacgaggttaccttggaagttaagtgggtgaatacatggcaggtacttagagcagcgcttggtccatagcaagcactccacaaacgtgagtggttgggtgatgaagtggccctccgcctgcctgctgcaccacgctgtcccgacgctgtctgttctgaaggtcctcaccactccccatagctgtggtccagccctggtctctgaagttcttctttcttgtcctctccatttacctgcctgttctctgtgacgatcctcaagccctatgctctttccccatcttctccctccccgccttcctccttccttccctgtttctcctctcttctttgcacacacgggagacagccagacacggctgtagctctttttcagccgaccttgcttcctctatctcaatctggtaattcacaaccctaaggaaatttgaagttctgaagatgttctttaagctcacaatccagaaaataataattttttaaaaagtatttcagcagccttcactggccacaatgttgaggggctctgctccccctggagaggtctctctagcctagatatgctggggttcactgcctgcagctgcaccttggcaaagaccaagggaggaagttgggcctgtttgtggaataggaaaatagtggcagaatctgagaggacggtgagtgtcgccatcagaataggattagagtagacccacataggaggcgggatcttcagctggccccaccacacctacccctcaccaccctgtcctcccctgcagtgcccacacactgagcttgctgccctggacctgtcccctgcgaccctcaaaaaaccagacctgaggcagcttccatccctgcccagtgacagctcatcccacagtttatcttctgcgagctcatgcttcctgttcctgggttgtagcccagcacatgaccaggagatttggggaaatggtgcattaacttcagggtgggtctaatggaggctgcgtagggcattgtgggagtccgtgcagggaggagcttttggtgggggagggggttggggcagggacctctgtctctgtctggaatcagaacctccccctggttcccagcagagcctagacggatgggggcgtacagtggggtagtggtggtgagtgaagggcatggagaagatgaaatctgagtccttccattccagttctccatcgcaggagccgggtctgtttatctggtgagtctggctcatgtagtcagtctggacatttccatttgagaacaagccagttggctctatatataacccaaatgtccagagaattgtcaatccttcccttcaagtctaaaaataggagagcaagtcccagttctgatgcttaaagatgactcactctagccactctagcctcagtttccctcaaaagcccgggggatggggctgacacctcagggcttccatgggcctggcacaaaacgtgaaaccacctcacagggccacagacacttagaggggcctgacaagtgttcatttctcgattcattttgctttggggagattttggattttttgtcatctcatttctctggaccaagaagggacaagccgcgcccttgctgcccgaatctccacctggtggcacctgagtttgtgcccagatgacacgctggagttgtcctgtttttgtccaagaccattgcacacatgcctgaggaacacacagcagccctgggtcccgcgcttgcactcggagctgcccgggccccgcctccccaggagaaaaggctccctgagctgcacctgctggagcaggcatgctgccaggaccctgatgtttcagctgcttctctgctctgtgattctgtctgaagtaggaaatagggcaggcttgctggtagactccagaggtcattaaaaatatgcaaaggaaataaacaggcctccatcaatcacttccttggcgggcttgcttggaagggtggctggggaagggcatgctgggtctggggcacagagctgggcctctcggggggtttgctgtctgtcttgctctccatgtgatgaactctgtcaggaaaatgccatggagtacctactacgtgccagggactgcgctggatagctttctgtaagctatttagtcgttactgttgcctggcgaggagtgaattactgtccatttccacagatgagaacactgaggctcagagaggttaaatgactgacaaaagaggttaaatcacacaggtttagacccagctctggtttcaaagctctgcctggacctgggctctctttcccaaggtctgtgccagccgagagccctctgcagtcctgtaaagcggatgagtgtgccgccctaccctggctcccatctcctatgctctgtgtgtcacctgctgtccggaggcacccaccctcactacagcccctcctgggcaacctctgcccaccatccatactatctggtctcgagacccatttcctctgagctgctctcacattggaaaattatccaagaaactctctgatacagtgagaatacctggtcgggaaatagtagattagtttactaggggagcaccttgttttcacagaggcaacgtgttttaacagaggactcctggaaccaatcctaagaagtaaatgtctaatagttgaaatttgttctttttgggtacatggtatatggtttattggaaggaatatcggctgtagagttacatatcaaatcccaaccctcacttactcgttgtgtgaacttggacaaattatgcaaactctctgagctcccactgtaccatttgtaatacggggataagtgaagttacgcacacaaagtgcacagcacagagcctggcattcagcaggaccatcaataaatatgagtttccttcctttccctttgagggcaaacaggttttgctgctttccttcaagtcatgtaatagccaccaacttcacttatgcatcagcccagccctggccatgtagacaaggtggtggtgttctgtacctttcgtgaagggacactcaggccacgagctctgcggacagcaggaagttttccctaggccagggaggaagagggggactgaaataggacttccttcagacatcgccaccagccgctactgtgtgtgcgagctcaactggcttttcccaaggggcccttcattccactcacggcaaacatcagcctggccagccccctgaggacggctgtgaggaagggcacacaagggcctgcagaaactctgggggcagcagggggaggcaggactcacccacatttcagggggagcgtttttgttcttcatcatcaatttttttcagaagggcttttgaggggtggactaaaggaggcagggagagaaaaaggaggatgacgagggaggagagagagagcagagaaatggtgcataaagggggcagatagttaggaggataaaggtggacggtataagctgcccttcattcagagggaacgcgctgatctcatgttcattaaccatcagctgggaatcttgttaaaactgcacattttgaaaacttaatgcaaatctttgaactttgattcaataagtctaaactagggccctaggaatatgcattttaaccagctcttctagcaatttggatgtagatatttggagaccacactttgagaagtacagaaccttcagctgggccctggaatggagattctcgaaagtcccaggctcctttccctggtaaaagcagattctttatctcattagaggggctgccactgcccttggactacaggagctattttccaggaatgtaatcaggcttgacccctgcctcctagctctcgccatgctgtgtctcctagtaaatacctgcctgcaactcttggcattgtttttggccttgagggcccagcctgtatttcaccctgttctcaaggcctggctgcattgatcagcccactggatttactgcctgaaacaaagcttagcgtgatacttgatcgatctctcctcatttcatgtcactcagaatggctcctgctggaaggtacctgagagacgatctggttcaattgtccttaaccagggtaggcatcaacaactgcttgtgaagctttgtaaaaataggcagggccaaactccaggaggctcctgatttggtgaacattctctctatagtgccatggcagatatatcagttaccctctagtattcattcttgcctccttcttcctctgctgggaatgtggatgtgatggctgcagctttagttgccatcttggaccatgagtaggagatgatcagctagtgagctggaagcatctggtgtccacagactgagtggagtagactgttcacctcggagttttacataagagagaagaaatgaacttctatgttgtttaattaacaaaaaaaaaggaagcccagacctgctccttgagattgaggtcctggatgctgaattcctgttcttctcaattttccgctagctttgtaagttatttgcaggtaactgctgtacgtatacttcctttgcagatcttacgaaatgaaacacactgccaggcatctacagtcaaacaacaaacacttagctgactgagcaagtggttgattaggttgcctatcctcccctttctactcaaagaaaatggggttcattggtagcgtcaggaattctgggctttcttcctgattctgattctgatttcgttctgtgccttggcattcactgtggtccacggtagaatgacagtctttaaccagacgacctccacactccatccatttctaacattctgacctaacggtagttctgagaggtgttcgtgtggtgtgagcaggaactcggaatacgtgaacctgattggctaagcttaccttgtggttggttgacaaatgactaggaaatggatggagttgagggttgatgcaacagcgtaattacaaggaagatggtgaacttggaaggttgccttgccaaaagcaaaacgaaaattcagttacctcattataggtactcatgaaggaagatggtgtcagaggaaaaatcggcatgactggacctgctgaggtgaaatcactgggaggtgaggttgtacctgaaaactggacctcagtggaaaaccctcagatggttcctcaccttacttcctccttcacctatggcctgttctcctgaatatccagttcaaaagatgagatcatttaattactctgtaggagaacatatcttccagatgccctagataggggggcagttctttgcagaggaagattttgatagaacttcagccaaaagagtagtttcattagatctgtcaaagcggcaaggctgctggctccttttctccccgtgcactgagagtagagagggtgctggctgtaatatctcttgccccccaaatgatccttgagctttcaaggttcacagaaatttcctggatgccccagttctttcttcttagtacctgggtagcagaacctccctggggatactcagctccctttattagagagcttctgcccagtgaggctttgtgcccaggtttaacataagttcctggggtgctgtgatagcagtgaagtcactaggattctagcatttttgcccccttcttttattttaatttgtccaaaggtgtgacttagtactgaccccagaatgggtgttagaatgagctgaagcgatgggtggattagtcaagtttagctccaaatgcagccctgattgtctgcttttgttcattctccctaggaaaggcattaagaaccccaaaagtgaacattagtgaattatcactcttcagaccaactggagcagcttcagtatggaaaacataggtgggcatgggcttgatagatgagttttatggaagctgagaactgaatcaatgaatgccacttggtctgttcttgggccatttattcgccatcttggtgcaattagacaaggatgtctagatgggggcttttactgtgtcagcttcaattagcaagtcatttttagttgttgctaatgcatcttctttattgtgccattgatcaattgcaacattcactttgacagtgtgggtagacaaggccactcaaggcagcctccacagaatgactaaggagcaatgcggtgtctcatctgggaccaagtggaatttgtctgtgtaataatcaggtgaaattgagtactgcttgttgtcacccttgttctatttttacctctcggattgattttttcaggatcaatgacagtatgggcattaacaaaatttgctgtggatgcctcctggttttgtgatagataactaaagatagcaccctgaatagcaatgttggtatacaatggcttcctggtcctgttggccacctactgagtctacaaacaccgcagatcgatgctgctggtctaatgactgcatttcagtctccacccattttctctaccagtatcatgttcttttcctgtatgtaactttggaatggttttgattagtggaataacagcatcaacagtttctaccgttattacaatttttcaaacacatggaactctgtaatgcattagccagaattaggtgctctgtcttgacattacctagctgtttgccctactcaagcccaagtgtggaaacttgctcatgaggaagagtcccttcacctgcagtgtcagtgcaccaccagccaatgcagtgagggccgatgcctgtccccatcaatgaacatcattcctttgtgcctcttgtcaagcaagtgcatcctattctgcacatgccacatgctctatcccgacttgtcactttaggctcttccagtctaccccccaaaaataataataattcttgattttagcattttggcaaaaggaaccgtttttgctgctatagatgttgtgtggttgtgtgattatggggacatggtgaagagtccagtgtgcactttatgaagttcacattagaggagaataaagtaggaaaaggggaatgacctaagacaaaaaacaagtggcagctgggcggctgtgacttcactctcatagtccttgtagtgaataaactcccctaggaaagggccgtgctgcagaatggcagccacttcttgtgaaggccatgacagctggattttgctccaggaggattagaggtctgttgctggaacagttgagccccagatggaataacgttagttggtttacatttaggggccgtgttgtttgaaaatacatatctttaaacactggaaacccactcagtgtggtgaagaaggccacaggaactaagaaagacaagctgaacagctgtcggggtctccccactcacatggggtggacatatgctgagagaagggtggatggtaccacacatcctgtttgaattgcatcctcccgccctctcaccttccctccctctccttatctcatagaggaatttgcctacgtaggtcaatgccatggggcttgacctgagcatgagatgccggggaagacctgcgttctcgtaggaaatgtatcggtgtgggaggcctggggtacgtgagcttggaggatcacctcatattgctaagcctcattttcccatctgagaaataaacaagttaacattaaaaacaagataatttgaaaaagaataataactaagatttattgagttcctccatgtgctaagcactattttaagcatttaagtgttttgactcctttaatactcatgatatcctgcaaggtaggtgcactgattagccccattttacaggtgggaaagctggcgacttgatttgaatccaggcagcctggcttcagtccagaggccaagtgcttagccaggatgctatttttccaatgtcctaaattatgtgggactaggagagaaaaacagttttaccctgcaacctttataaagcccacttggccagatggagatacaaaaagcaatttctaaaaacaacaatgataaatcagtgatgaagggaaggattatataataaatggtgctaggacaattggttagctgcttggaaaaaatatcaaagcgatttggatcctcatctcatacagtttgccacaatatattccaagttgattaaatagattaatggaaaaagaagaagaaaatagagtatcaaatgtctgactgggggaggactttaatagctcaaaacagtgaaagaaattacaaaaattggggatagttacaactttaaaaaactggaagtctctgcatcaggaataaaagagcaaacaataaatttgggaaagtacttaccacgaatgtagtatttttccttaatatccatatttaaatatgtatctaaagaaatgcgaagactctgatagacaggtgtgcaaaggagccgtatgataccctaataacatttggaagtgttcaacctcagcaataatttaaaaaattctaatttaaaaagaaataccatgttaatatgattatatttattcatctatatcatatgtacatgtatggatgtatatataatatggattatgtacatacacacatatgtacatatcccaactcgagagctgctgaaaggacttagaaataatgacacccctagagcaatatgtgagtctagcatctagattttggtttctaatattgtgctttactgaaaggaatcaaaggcaaagtcagcacaagagagcttcttgctacatctggtgccagaaagtcatgctctcagaaggacgaggtcgtgtcaaaggacacagaagtcccatccaagagcttcctactgcctaaatcccggataattagagcatcaaaagagaggagacattaacagcttaaataagaatccatgagtctataccgacatacggaagttagtgaataaacggggcagaatgaggaaaacttttccttaggacataatgccaactaacaaatgtggacacgccacccaatgtgatatcccaagatggacccaacatcacttccgtggtgctcctgcccaaaatgcgtgattctgagctaatcaggaggaaatattagacaaacccaaattgagggacatgctacaaatatcctggcttgttctttttaaaaaggtcatggtcatggaagacagagggatggagagaactgttttagattaaaggaactaaagattaaaggaactaaagaaatatgacaattaagtgtaatgcatgacttaggttgaatcctgaactcccttttattaaattttttttggtataaagggcatggggtgaaatttaaggcctacagattagttacagtactgtgtccatgttaaatttcttattttgctcatcacagtatatgaaaatgtctttgtttctataaaatacatgctgaagtatttaggcataaaggacatcctgtttggaacttagtctcagatgattccaaaaaaatatatgtgtgtttatgtatgtgtatgtatgttacatatgtatatttctgcctacatacctatctattgaggaataataaagcaaatatgacaaaaatgttagcaattggaccatctaggggaagcatctatgtgagtgtctttctctgttcttgcaacttttctctaagtttgaaattatttcaaaataaaaagataaaaagaaaaaggcaagtgccctattttgcttgttgatgaataaggacaagccattgaaggagaggatgtgagtgtgtagcaggaactcctaaaccctagccacaggaaagacttggccagacttttctggaatgtaacttggcaatttgtattaagaatcttaaaaatatccataacttttagccccatttctgctcaaataaaataaacaaaaatgcaaagacgtatgcacaagtatcttatgacagtgtgacttccaacagtaaaatattggagacaatttaaatatttaacaatgggggcctggtgtagccctaccatggaataggatgtgcccatttaatgatgtctctgaagagtttttaacagcatgacagcatgcttaccttatcatgtcctgtgaaataccagaataaaatgtacatgcagtagaatctcaattacatccaaaatacgcattataaatctggaagaaagtaagccaaaatgtggagtatacttggtagcatttctccctactttttaatatttttttagtaatatcacattttttatcataaggaagtatcctaaaggcagaaaacaacaaataaagtagcaatgaagttctgagtctttctgtgactgtgtgacgacagtgtctgaacagttatccctccggcagtgacgagcagccccttggacatgttccagtcccagttcttcagacttcagaaagtggggaagactccgtgggggaagaggaggggttgctgatgtcatggtgacaacgtggagtgtggcacacctacaggtcttgatgggctgtgtgctgggcactccggaatctcatttaatccccctagtggataaggaacactaagtattggagagacagaatgatttacccaaggccagtgtgtagtaagaggtgcggctggaattccaggtgagattgggagactccaaaacctgtgctcttaattccagccctgcctggcctcctggatcatgcccatggtgggtgaactgggggcgctggcccccacgctgccatcctgacttgtcagcctgtttgcttcctcctctctgttgtgatttcctcaagcttgttattaaataacaagcatccttcctgcgttttctcctggaattctcatcccacagtggcctaaggggaaggcaaactgtatgcctgtgcataggaagcatgaccgcgccatccagcctccttccagtagcagtggatgcagccttgttagggtgattctgaccccttgttctccgtcacctcacaaggcgtaacgacaggggacagctgcagagagagatggaggttggcattcagaagcctttctgacagcaagagtgaatcaacacaaaatgaatcacacaaagacaccattcactgtctccccagagagcctggagaagaaatgcctgccatttgtgtagctctttttgatgttcaaagctctgtggcacacagccctccttagggtctcacaagaactccctaagaaagacaagacaggaattacttcccttaggaaaggaaactgaggctcagggaaatcaagttacttgcctcccgtcattggtgactaggtcagtcttctaacttcctctttatcccttcttactccttctgcaaacagtacgatgctgggcagagtggaagatcccttattgtctcaccctggggcaaggagatgggctagatcattcctaatgctgcttcctgcctcagaagatgaatttgcctacaagaggtgggccctccatgcttataaatccttctccttcaggttacccccacctagtgaaaaagatttacacaaggcagaaagtgggtggaagccatttggccactcatgatgtcttattctagaggaggccccctgaagtgaaggtgccacagcattactgcagttcagcagacatttaccagcatatgccagtcactctactggaactgaggagagagaaagccagggaaaaggttgccatgggttgagtcaaaagaactcattctaggctcaaaaggacaggagcgctggttcattaggatgctcaacttccaactagcagactgggcacatgtcctagagaggaattgtgctgtagtgaggcgaagtgggcttggatgtctggcaagtcatggttcagatactgactccagccaggcacggtggttcacgcccatagtcccagtgactcaggatgccaagacagtaggatttcttgaggccaggactttgagaccggcctggactacatagtgaggccccgtttctacaaaataatatttttttcaatgttgactttatttcttagctgtgtgacttccagcaaattctttaacttcattgaaactcagttttttcagctataaaattaagagaataaataaactgtcccattgtatgatgcaaggattaaatgagatgacagcaactaaaggcctgccaccatcaactcttggcaatttatttccctcctaaattagatagaaatgtcatggtttggggtttccattgtgtgttcaagaaagataagaccgtaacgcctttcttaaatgtctaagcttcattatcagagcttcttgcacgttctctttaagcttttcccccatagacctatccaatggccccaggctgaggcacccattccagggactcccacgcctgcttccaagctagcagtggcctctcatgagcctcaaccctattctgagatgctctgggtttggaggttctagtatctcagccacacatagtgccattttaccttgtcccagctggccaaagtgtgactgtgatcccctgtcttccccctcactcacccggcagcctcatcttggctgctggcgattttaggctgggttccacaagtggccccagtgatttatgatccataactcagtggtctcttccgccatgcctgcaggctcccaccttccggaagtcactggaatttaaaacaccatgaaaacaaacatctgtgatttacgatgtcaagagccatttccttcctcttgagacaatctccagggtgattttctttaggtcatctgctctgtagagcatattagttaaaaaaaaaaaaccttaaacataatgtagaaagatgtgcaggtatggaagacagaatggcagcacctttccacgggtggcagccatcagacagagcaggacatgcacagcgtggctccctcctgtccctggaaggcaggtctgctctgttctcttctttcacatgtgtctactcccagcctttccaggtgcaggacagggcaagcatcagaaacactgggtgagggaccggccctccctttgagtgcttcctccctgcacatctgagtcccatctgtagacccagagtgaggacatctgcccaacctccctgcaggctgttgtgaggtcagcagaggcccagaagccatggtaacttctataggagagacgcaggatgaagaaagttgttgtgacttttgcccagaattgtcaagaatacttcaagtggtatagatgtttttcccaaaaaaaagtaaggctgaaaaaaatcaaggctgatcctaaggctgttcaagtacaaacagtttgcaagtaatggaaaaagctataaaattttaatatagggagacctcaaagccttgaaaggaaatataaaacaactccaaaaaaaaaaaaaaaaaacaaaccctaagcatcctctttgttcctcagtgaaaatttccttactattttaagccacattgattcccaagagagaaactggcaaagcatggatggagaagcttcatttccctaccactgctgtgaaaataccctatgctaatttaaggatatagaattttctaataaaaacaaccagagtgcactaggcacgattattccaacctatctttctattgtattggtccatctactttgccgatttccaaaggaattagagacggctttattacatttaagataatatgaaagaagacaagtatagcccctctttgatttttatgttacacattgggcagtaggtttttaaagagccgtgtttgactctgtcctattttggggcccaggtacatgattcctatttttagcaactctctggtattgtgaatctgagatttcaaccaccagtgagtcagaaggtctggctgcccagagatatgtgactcagacaggcaggaatagtctgttcaccatgagatgagggcttaaaggggagcttttgtgcttagtgaaacacgcaaatgaaaacaaccgtttaaataggaacctattgcccttccggaaggctctttgcctgtccccgaaaattctcagctcacacccagggaagagctggtgctgctagctgggaaatgaggccaaccccctggctacttcctcctctttaggggccctctaaggcatctgggcggaggtttctgggtggcttcagccttcagaattaacacaacagcctcctgatgggcagcagtggtgggagaaaggagcgagtggagtgccatgtcgggcagggttgggacacaggatgagatactactcttttaagagtaagacaccgcaagaaaaggtggcttcccctggaaaggtgggaagcaacagattggtgttttcttgattagaaatgctatggaattcattcatccattcaccatccatccatccatccaaacaaccaatgcatatgggaagctggctacgtcctcggtcctttgctaggtactaggggactggtttccatcctcgagaagcccacaggcttgtgggaggaagataagcaggtagagaggcagcctggctgcaatgcccttccaagaccaaggttttgggattccaagtttctgaggtgttctgcatggtcagtagtccctgagaggcccttcccctgtagaactgagtgagcattcagggtaaacctggctaaacacagactagccaggaccattgtttctggccgtatgaacaccctccttttcctttcctccagacttagactccttttggagccaagcaccccaagactgtaggccttctctgggcgtgagcctgagggtcacagtgctcaccagccctccagcctcgccacagtgaagatgcttatcatggaggctgggatagttgtgtttttcgctggtgtttagatgttccagtgttccatgaaagctcctgaatctcttccctaaataacaaagtcctgtttggtatttggtgaaatgtttggagtgccgtgttcaaccaagctgaactaagctgctgacaaaatactgtctcagccctttaataataatagctaacatttgtatagcactctacagtttaacaaagcactttaaatgcacccagcccctttgagatgcgagggcagagttatcatgtgcgtttcactcaggaaaagtgggctgcccagaggaactgagtaacaccctccaggacccaccactggggaggccagaagctggccctcctgaaccaggcactttgcccttggccaccttctctgaagcctgtggtgaccacgcctcctcctctgacttcaggtttggtctttgcctctggtctcagccccctgtagtatcccacaggcagcccccaggcagatctccttaattgtcccctttctctgcttcagcacctggaatgactgtcccaggattaagtccacacttccagcctggaatcccctctctgcacagcctggtcctatcccaggaccctacactccccctcactacccccagcatgcctttcctacagccaggcaggacttggcaggagcatgccacgccaactttagaccccagtgctggctacatggggggaggagagggcaactcgttttttaactattgacccctccttgatgtctggcaaggggctaattagcagcaaacgtcttctgaatcagtaagtcagagaatcggtaaatgaagaaaacggacatctgtataggcataatagcatccccatgcagtccatagcaagaagagaccccagggtgggcgccttgtgcacaagggtctgtctgagatagatgccaaggccaatggacacatgccgtccacaggtcctggctgtgtggctcaggatgcactggagccaaaagtggctgcataccagaaatgtccccccacccccacccccatgaagctgatacagctggaaccatggtccccctccctccagtcagtgacactgaccaccggtggctcatctcagctgttcttttggcagatgccattcttttgctccccagagactgggtgatgtctgagagatagggttagggttggcaaggttggtgtgaagtgggtaactttggagcagcgagcgacccggtatgcctgtgcatccaggacacagggcccaggaagcatgagaatagcaggagccttggaggaggtgcccttgggggtggaatagggctcttgagggcttatcctaggcccaaggaaatgaagggaacttctttccttcttgtccctttcccccaacacacccccaagttgagctagcatacccatcatgctaaacaggtttaacaggttttatgatccaatctgattatcttattatgagttacagattgttttataggaaaaatgcttccccccatatcaataatagcttctcttttaatttagagaataatttcaaaattataattacacaagtacagtcacgaattgcttaacaatggggatacattctaagaaatgcgttgttaggtgatttcatcatatgtgaacatcatagagtgaatatacacaaacctggatggttgagcctgctgcacacctaggctatatggcgtagcccatcgttccttggattccgtacagcatgccactgtacttcagtactgtaagcaattgtaatacaatgctaaacatatctaaacatagaaaaggtacaaagtacagtataaaagattaagaaagtggtttgcctgtgtaggtcatttaccatgaatggagcttgcaggactggaagttgctctgtgtgagtcatgagtgagtggacatgactgcacactactgtggactttattaacagtggacttaggctacactaaatttataaaaaatatgtttcttcctgcaataatacgttaaccttagcttgctataacttttttgctttataaactttaatttttaacttgatgactcttataataacatgtagcttaaaacacaaacacacagctgtacaaaaatactctctttatatccttttttctatgtgatgtattctattaaaaattattttattttattttttgctttgtaaattttttgttaagaagtaagacacgcgcacatagtaacctagacctacgcaggtcatcaagatgtcatgaggtgataggaatttttcagcctcattataaccttatgagaccaccattgtgtatgtggcctgttgttgactgcagtgttatgcagcacgtgactgtcgtacatagtcattatcaaaaaattaagggcagatttttaaagagcaaagaagttcattcaaaatctcagaccaaagggatactactctcttttatgtgtatatccttccagtctttaccatgcaaatatggaaatatatttttttaaaaaagaatcctactacacatattactatgtactttggtttttaaaaactatatgtaatgactgtccttttgtggcattaaatatgaatctgcagtataatgtggaatcctgtgaaggtgtcctggtgttcataattcatctgctgtttggtgagcacgaagctgttttcacagtttcagcagcacagtgaagaataactttattcttctatatacaactttataatgtacataataacatatatatgtaaaataaataactgtattctatatatacccctttttgcagatgtattctaacagaaggatttataggtgaaaagttatgttttttgctttattttgccaaaaggcacttaagaaagcctgtccaaatctggattctcagcagcagaatatgaaagtttctgactcctcacacccatgccaacaggctgagcattatctttattaatctgaaaggaagaaaacaagtgaatgggacatagcattgggaaaatgctttctgaacccacaattactcttctaaaacacaacccaagtgccacctgtacaacctctaacaaaacatggctgaacccaagctggggcattcttatttctacctgtagttaagataaaattctgatcaacagagggatccggagggtccctggaaatgtattgagaggagattgatttgatccatagctgaagtttccttgaaaaaagacactggctgggtgtggtggctcacgcctgtaatcccagcactttgggaggccgaggctggcagatcacgaggtcaggagatcgagaccatcctggttaacacggtgaaaccccatctctctaaaaatacaaaaaaattagccgggcgtggtggcgggcgcctgtagtcccagctactcaggagactgaggcaggagaatggcgtgaagctgggaggcagagcttgcagtgagccgagattgtgccactgcaccccagcctgggcgacagagtgagactccgtctcaaaaaagaaaaaaaaaagacttggccttttaatgaaatacagcgatacggcagtaggcaccttcaacactccctagggggagtggacatgaacgtttttgcatgtaagacttggtcgaaagccctggtccaggcctggatgtgccacttgttacccttgtcacctggacaggcctcttcctgttttcacctgcggtggcttggggcagtgaggggagtgctggggcactggtcacacagatcctggttcctccctgcatcctggctgtgtgactggcaggcgatctgcagaaagattgtgtctctgacccctgggatagcgtgaggattagagcacatggtgcgagcttggcacttggtcattgttttcctttggctctttccctttttcatctgttccagcgagggattaaactatctgatgtctaagaaccccatgagatccaatttcctgaggattccaaggcagcccaggtgaggccctgctcttctaagtatgaagttcagagtcgctgtggaatccccactctgggaggcagtgctgtgcgggccctgcgtttcacacaggtagccacaggcccctgtgcacacctgagaggcagcctcccgcggagccctgctggactgtgacgttatccacatgccttagcagatgtctgtcattgtcttcttgcctttgtgggtttgtcctctgtttagaaaaatgaatttcctgagggcaagaccaggttcatcatctcctctgacttttgcctgccctcaaataagtctggaactagtacgagcacgtgtgacggaccctcattcaggggtaactgactggttgataaggagtttgactggcaaggaagtgatttcaatgggtcagcctctctggccctggctgtgatgatctgtttaccgcagcttaaccttagtggatttcagcccatcggcacaacccacatagccccattcagctcatggctgcatttaaggcccactgatagcctcggatttggggagtgttaaccccatgctgcttgggtatgcttcgacccaacctcacgggttaaaatcatgatggtgaggtattacagggcccagtcatttgttaggaaataaaaccagactgtttccaaagagtagagaaataggatgactcatgaagtattaaccacttaaaaaccctccttaggcatgtcttcccttggctcccttgagcggtgtcacccgacagattgcagtatgattgtcattgctgtgttgaagttacccaccctgaactcatgctgggtatcctcagtcagggcatcgttctgtttgtttctactttgtgcacataactggtaccttttcttttccctgccctgtctcgtcacttataatataaagggagttaatccagccacttgtatatcctgagtcctttttgtgtatccagcactttgtaaatttactataggcattcattcatcctcttcctcattcaatccacaaatattgaatatccacaactggcaggataacagccagttgctttgaacaaagagtttctttctaagcccatgaatgtgactatgcctagcacagtgcctggcacactgaggtgcccagtgcatttataaaaagcaactctcagggttcttgacggagctgtgtcatactgaagccccctggcctagatagattcgcctggatgaaacacttccctgccttcttaaacagaatgcattgaatttactttcatcttttcctgatgcctccaagccatcattttgaacatcagtgctgcagtaggatgatgtgttgcttctgttttattgaggtataccagttctttgcccttaacgttaaatcagcctgagtgttgtctttgtgagcccttgtgtttgatttctgtagtttgcctccttcccagcagtgaaactgaggatgcttattttttattccatcagtgaatctttgtgataacaagcatcttacatttatttagcagttttcatgtgcattattttatttaagccttatatcagctctgcaaggcagataggatcatttccaatttgctgattaaaagagaaaaaacaaacaagcaagcaacagactgaagctttcaagagctcagcaacctgccaaagatacatggctagaaggaagacactgggattcaggactgggtgtcctgattctaggctgggactctttctgtgccaacatccttcttccctttagcaactcccaaccttctttctagtttggtactggtaatctgccacaaagcttgttaaaattgggcgcaaaatgaccaggtgaaggtttaagagtctctcctttggagacagtgtttgagatttagtgcctgggttttgtggcctctctctatttggctgttcacaacctttttcttctctctgtctgaagtgtaagcaaggaggaagggtaacagatcgaattgccagatttaacaaaaaacaaaacaaagaaacaacagaacaaaaccaaacacaagatgcccagctggatttgaatttcagatagacaacaaataattttttgtaagtatatcctaactgttacatggagcatacttatactgaaaaaaaaattatttgttgtttatctgaaattcaaatctagctgggtgtcctgtattttatctgtagccctaataccaggactgtggctgggtgggcagtgtctgatctgtaatgacagcagagtcttcagtaagagtgggggctgggaaaataaattaatgggttgcagaatgtatagtgttaattagataatgcttcctggaaaagacggatcttgagctattatttacagggcagtagggaaatgatgtggccgctagctgcagaaagagcaactcatatgaaaaagaatggcagaccggagaggccaaggctcagagacacatgcacacaccaaataagggtctgtttactttgactgtaaaagtgtattactttttgactgcaacaatgtttcatctcctgcctaacataatgaccagtttggttcctgtcctggaaatagagaaaacggtgccaccttccccacacacttgagttgatctgacattgatagtttgaaaactttggttcccccaggcagtaaatttaaggagcaaccctgtcttgaaaacggaattaggttaccaaagacttccggcagttgagaatttcttgaaatccagaatatcatattttcccaataatgccttcttgcgatctcacacatcatgcttttaaggccgattgctactactgttaggaaatttacctgtgatggtctcaggtaatagaagttgtggataagttgaaaattgccagcctgttaaatggaatgatgtagcaaagaaagggcattctttttgaacacttcctccaggtgtgtgagcgtttcacactctgcattttcacagtatctttgtgaaggtagctctgggttctcttgcaccctggagaggtaggaacatgcctagtgccctcctgtgagtctgtcccctctcttctcttattaggggcatttgcattacaaatccacagaccaagcaactctttttaaaacatttatgttcaactgcttttttgagtgcttatcattccagagaatgtgaagatacatggcccaaaacctcctccctcaatagtgtcttgagtgcggagtctgtgggctgtcctgggatgggccctcaccttgctttattcccacagcacacctcactcccagatgaggatgtgcgcctatgtgtgtccctgtgtgtgtggaggctgagactgcaggcacttgcccaatgccccatgtagcaccactgagattcaagctcatgtttttttatttgaatgtcatactttctacttgccaggttactccatcaaaacagtgataacaaaccaggacagggcagatggtgcatagtggtggcagaattggacagatttaactgtttctttaagaaatatttactttcttgagcatttactgctgccctaagagactagctttggggttttcctagcttcgcagaagtgtggacgttgattccagcttttcccaaacatttttggccttgaaatgaagctgggaaccatactagatcaagctctctggccgtgagccccatgtctgtgggtttgaatgatctagagaggaactgcatgctcaatcagaaccagcaggaagctgagcagggttagaaggctcagtccctctgagagtaggaagagggcatacctcaggagcttgccaagtgcgcagaggtgaaagggaatgtgagagagtctatggggcaggggtgacatttgaacagggaaggatgctgtggcatagatatcaaggctcgaacaggcagctccccctgtacgccaggcattaactggattggtagctggattgcgaagaggtccaggagccctggaaggagggccacaaggtggaagattctcggtgagcatagggcagtggccactaaccaactggttccaaagtgttttaatgatgtaagtgcttagttaaatattaaatgctttattacacatactaactcagtaacttttacaaataacccggaagttagattttgttaatatctccatttcacaaatgttgaaactgaggcactgagtgattaagaaacttctctaaaattgtagctagaaagtggcacggctggactggaaccatctgtttaactttgaaggctgtgctcttaattacaaggtgacttttgtctccttatgcaaatcgcctgttactgtctctgcaggttgatctaggctggccactagaaatagttcacttcaaaatgatgacatggaggtgactgaatggggtgggtcatatggtacagccgtgatcatctgtccctgaggtcctaaaatggagtatggtgagatgtttatgcttttgaaccttcatgaacttttccgctcttccttgggccaaattccaaggtccaggacttggaggaagggaagtagaaacccactcgcctcctcaggaccctgcctggctacatgaaacccccattaatcacctctgacgcccgggcttggtctgtgaaggaacgtgggccgtatggcagtgatgggaggaggctgagatagtgctgaagatgcacagcctctgtgttccatttagaaccgctgaagctccccaggtgcaccaggagccttcccaagacctggatccgctgcaaggtgatagccgtggcttggttgtctgtgggtggagccgaggaaggcagaggtgtgcgtgtgtgtctctgtgtgtgtcatctctgtgtgtgtctgtgtgtgtctctgtctgtgcatctctcgtatgtgcctgtgtctctatgtaatgtgtttgtgtgtacatttctgtgtgtctgtgtgtctttgtaatgtgtgtgtgtgcctatgtatgtctctgtgtttgtgtgtttgtgtgtctatgtctgtgtttgggcaagactgtgttccacccccttccccaggcttgggacaagctcacattccacaggtcctagaggaaatgtttttgctgtccagggctttgggacaatgggcttgctatgttttaaattttgggccccaggaagagagttgcccctgtgttaggatggctgtggctcagtcacatactcccccatttctcttagccggccccagtgtgtgtcctgggggcgtagtcactgcccttccaagcctggagaatgactgcatcgtccaccgtgatgaagtacaggctttgccagggcttagcagggggaattggaaggccttaaaaggaacatttagaaatcaggagtcaaacgtgacttggacattaaaacttgattttgcatccagctcatgataagcatatagcagcatatacacaaatacatacaaagcagtgtgtatgtggcaatcatttggtgcctcactcacctccaaggcttgttaggggtgccatgatttgaaccatctcacctctgcatttttgctggtgtctccctcttctcagaatgctagtcctttgtataaccctttccactggctggggccacagaccttacaggactaagaggccatctgaccccctttcaatgagtagggtgctcctctttgtgtaggatcacaccgcagttttagcctgtctgaactcttgttataattctttgctcccctatgttcctggagggcagagaccaagccttgctccttgtactacctccaagggtatgtgagcctgccatgtgtatgcagctagcatctgaatggatgaatgaatgaacaaatgcaccctttctcacctccccacgaacactgcactttccccacatctgtcagtgaggaatgaactaagtgagatgtaccagcacccatggttgcctgtcttcccgatcatacggtttacatttgcagttcagcatccagtgctgtgtgctaggtacatccacagcatcacagtttcatttcatgctgctgacaactgtttaaacttatcctttctggagggagatggggaaaggaaattaggctccacatttgtaccagtaaaaagcttcaagagagatcctgagtgcagcgggctgaggatcacagaagttggcaggctctaggcctgatgctcatagggtggtatcccagggcttcctctgacccagtcagtaggaacaccgctccaggaccagagaatcctagaggacaggagcccaggacccgtgggggccagtctcatagctcctgcctttgggatttgtgggagggtttgccttatgggattccattctctgagctccatccatgtggccaggccctatgccctttttgcctgactcatgcctgagcttggacactaaaccagacctgcccagtgatgtccctggccagcttctacaggaggacacatccccacattgggagcaggtcccagactcaggtcttgccctttctctgtccccaccagctccaaggggctgtgcacttggtaggctgttggagtatcacaccagattccagaagaggggccaggagcgggaggattatgccctggggccattctcaccggactgttggaaacagtctttggtacctgctgagagagccagtgccagctgggaaatctgtgaggtctccctgaggaagcttgtcctagaaactgcagtgaggtgactgtgcggcaggcccactctcaactcgaggggagcccctcctgcctgctgcaggagtgggagcgtggggctagctgccagtgggatggccccagccggaggagctgggcagtgcagcgaggcgccagctgtgcctgactcctgaggccttctgctcaccggaaggggggcaggtctgcagcccctcccccactgcagggccaggacaggccgtcctgagtgctggccctgaggatctagaccctttggatcctatgtgcgggggacttcccaagagctcccggcccacgactgagtcacgcggcttcttagcaacttagtcaatccaaacgtggaggtgattggcatatgtaagaaccccctttcccgttggcgtgtatggtgtcttctcgctgagccacagcacctggtttagggctacaaatagtctccccgagggaatgggctcatacgccgggtgggcaaggatttcaagtcgtcggcacaagaagagacactatattaaggcctggttatgtttagaagccgtccagagaatgtttggcatgctgaatataaactcatgcttccgtctgctgccacactttaagatttctcccagagggacccagagtgtggggcgccctggagaaggagctgggaatgtctcgggggaaaggttccttcctcgggaactgggtggcatgggagagtagcttcaagcttgctcatggctggacttcccagacacagggtggggctgttggatgttacccgtcatgtcagcattcagagcccggcaggaaaaagcctccttcaaagtgaacccaattcctaaagtcctccttaatggaattcctcttagaggcaggcatcgactggctaactggtatgatactttggagttcagttagcccagaatggtgaagaaaatggctgtcacccaaaacacactgaattgaaggacggtggtgccagaaaagactgtgggttatcttatccagccccttcatctataacatggggaaactgaggcctaatagaggatggtgacctgctctactgatggcattcagcactacaccaaggtcacgggaggggtctgctctaatagcatgttcccatggactggaaaacgtcagaagggtagaatacaatacaaacaccgttaggactgagatgtggccagcatgaagtcccatggtcctgtgtgagtggaaccttggtgtggaaagtggcccctggcagcgttgggacatagagcagtttgggtggggttctaactgggtatggaatttcaacagactcgcagggagattctctagtactgtctcaattggaatcatcgttttttttaaagttaagaagaaaaatggaagggctcaggtgaaataaacattttacaagcagatgcttgcctctgccagcctgggggcattttgagtaggggcgcagcatgcaaagcagagaagagctcccacgtctgccccctgccctcctcccctctggaattttagcccctgcttggcattgccatgggtgtgaaaggtggtgtctggactcaggaggaaggtactgcagagggtaggaagagctctgcagtggtcccacggatctggctttaaaccaggagctcttgcgagtctggagctacgtgagttctctgagcctctgtttcttcatctgcagaatggggataggatggttgtatgggaggaacgcaccttgcacagtgtctggcacacagcaccctccgaaaggggctctccatgtactaggtgctcaggaaagattgcaatctgactaggagttttgaaatttgtgatttacttagtcttggggaggaaagaagagtcgttttccatggatcagtatgtgtagatgtggttgcagagacagtcagagaaagaaatggagccaggacaaaggggtggccccagcattcacgaaaggtttcagaattcctttttgggtttttggctatgacacccctcttaggagtcatgtttgttcactgtctagtgagaaggtgatcttctagtaacctccttttggggggcctataaggaattccttcttgctgttcgtgccttctctcacaacactagtgtgagaccagagaccccacctcacctccatcaggtgaagatccaaagcagagaggagtccctgactggaccttccccaggggtgggttgtgatgagatgagtgattatcaacactgagtgaggggtggtcatgggccagatgctgctgaagcctttacttcctagcagccttgttaggtaggagactgtgactctcccattttacagatgaggaagttgaggtagtaaacagtcatataacttgcccaagcacacacaaatagtgatgttgctttgatttcagccagacagtctggctccagaatctgtctctttcatctctaagccttttaagtagcagaaagagaaagatcaagggggcaatggggcctgaatgtgtccacaatgatggcaaacagaagaggaagtgtgctgggctgcggggccattgatgcccatgaactgaagagcccgaatgcctggatgatgaatggctggtcaccccctcatatgggcagcagaggctgtcttcaggctcggcggctcagctgccattggcctgaatggagtcctcttttttccaagccctttcccctggacaattgctgagctctgccccctttcgcaggcacctccccatgtcgcaggacaccagagtcttcaggttggaaggaccctggaggtcaccctgtttattcttccacctgactcaggagtcctttgtagccttcttggcaggacctgtcgaatcaagcaaggatgatggagaagcccttggatgtccatctagttgatagaaagttcttgttcataaactcaagccgaaggctgccctggagcagctccagccactggccctagccaggccctctggtctgttccctcgggccccttctgaaggcaatttctgagtgaactgtttcagatactctaatggaagtttcttggccttggccctattgacatttggggatggataattctttcttgtctggggctggcctgtgcatggtaggatgtttagcagtatccctggcctctacccactgggtaccagtagcagtcacgccgtacccccagctgtgatgaccaaaaatgtctccagatactgccaaatgtcccctggggcgaaggtggccgaaatcgcctgggttgatctgctgttctaattctgccttgcccagtgctcagagagcagcccccaccccagcctccgatggccattggctgaagcaaaaccatctcccttcacctggcctctgctgaagcggcctggaataaacaaggcagcggtccccaaggccacttcctggccctggaggtggtctggtttcctcagttgccctgtcagcaatgggtggcatagggcctgccccacccttctgtccttcctctcctcaagggtggctgatgcaggagttgagggaccttagggtccagggcgtggctggcagtggagggatgggttatttctaaggtctttcccacttgtccttccccagggtgtgtctgcagtgatcttctcatttggttggtgtctgccatgctgcagaagggaaaacagcattgcacgcctgtgtcctggcttagggtcatgagagcgtgtttcctcccatgtgggttctgcaggtgcttccttgggctgcccctttccctacccctacccctaaatacatgcccaccacctcttctgcacaccgtgggtctggaaattacccaacaaggagacgggagcaaggaagagacatccccaggctctggaaagtcctgaggacaaagccaggattccggtcttgtcaggttttctgtctgcccagtgcagaagaccttagtaacctgccctgttatctgtgtcctgactcagaaatgtgttggttgaaacgtcaggctttcacccaaaatgcagcacaatcaccctgtccctagagccacaaaaattccctttctctgtttccagtttgttctgtagcagcttggtgtgaagacagacagtctagagcatcatcaggtgagatgctcacctaatgtcccagacctgcactgtgggccttggcagaggcaccgacttgaagacattactttcttctcccactctcctgctcatttgacgaggtctcctaggctgcctaaggttgtcagaaggtctgtatggtgagacctcaattgacaggccctctgaaaatacagttaccctgtaattaaattcttatgctaaaaaaagtcttcatcaatcatacaaaataagctgcctgcatttgatgtgtgtgggttgcaggaagatttggggaaacgtggtcgggtttgaagaccttcacaagacatgccaggtgaattctgtgtcgctgctgtcatcccgccttttccagtaatggcctcctttctttatcttggtggggagatgctggttacccccaaggatgctgaaattagcactgcattatttgttgggggaaatagactctgtggaccgttgagtgtctggcaaagaaaaatgagttcaggactaaccctgacatacctcttggtggggagatgctggttacccccaaggatgctgaattagcactgcattacttgttgggggaaatagactctgtggaccgttgagtgtctggcaaagaaaaatgagttcaggactaaccctgacctacctctttgttgtgatataggatctgaaaaggcccctttgacctccagtgttgccaatctgtaagactggataatgatgtcacactgactttctcagagcagtggcgaggaccaaatcagactctgcaagacaaatgcagtttcaacttatgaagcatacacacaagggactgatggattgttattgtggaagaaaaggggggattgttattttaaggaatcttgtccttaaagtaatcttggttgagcgctccacgtgcaaggcagtgttctgggtgctggggcgaggtcacctgtggaattggcaccgaagcaggtcaggtgggagggagtttagaggaaggccacgtcactctggttgggatgctgggggctgttgtcctggagaaagtggcctcaggctgagtctggcaggtgggtagaatttccacagggagagatgctggcctatgcagaagttctcacccaccctgcaagtctccaaggcctgactcacacagcagagtgagccccccctggtgctgggaaattctgaagcccatggggacaaccttgtccccctggccgtgctcttatcctccctacctgtcccatgccaggagcgcttctatgctgctgccttggaagactgtcctaacaggcggcgctgccgcgctcagcacctgggctgggaagaagagcacttagtttgcctcttggagccctggggctccctgcagcaggaggtggagagggagacgtggagggtctgcttccatcaagtcaaggtccgaagggccccatggaggagacgggtcagcagcctctgcccttggatttgccaagtgccccccattgtgttggggctcagggagaatactccagtttggagggcttcctggaggaagtggagcatgacccgtgcctcaatctagaggagatttgaaggggaggctgtctgggggtgggagagacagtgcaggcccagggctgagatggccagagcctgtttgtgggattctgatgagatggcttggctgaggcagagctgtgtggggagaggcaggggaaggagatcagggcggctgggagcacaccttctggtcccgaatgctgggctgtggtgctgcactgtcctgccatcagcagtgggccttctgtgtgtggcaggatgagacgctagtcatgtttgggtgtgattaatctggccactgtgttcacacaggttagaggaaggagaatctggagacaaatgcctgcccagcgaccactgcagggtcccgggagctgggtgaaagtggcagagctgggaggttgctctgaaatgctgatggggatggagtgggggctgtcgggaaggactggatggagtctgtttttccagaaccccttaacccagtggaagccccgcctttcatgtgggccccgcacagttaggctgcccgagtccctctgtcctcgcaccctcacctggctctcttgcctaagcctgtcacagaagccctgcagagcaggaaacacagagcagaaagccacgcacacagcttgtgtttcctctggcgcctctaggtcgctctgcagccacctgcttggagtggtgataagccaaatctttctttagaggagcgaaaacacagctagccagggctgcagctatgactgcagcctgtagggaaacgccgggaggaacaggagactgttgagaaggggacggagaacctcaccagcagctgaattgaattccatctttgagacccaagagagggaaaatgcctttccgcatgcatgctctcctagctatgcttgtaagaagtgcgtgcttctggttgggagagcccaggaacggagtccatcctttctcctggcctccagggagagcccagacactcctgaccacagactggcttgtaatttggcttttctgagcatggcaagagaatcctgcatgtcacttgggcctgacacctgcttttgccttctccagacacggcaagactggccttgacttctggttccattctcgtttccctgggctgctctccaccttccaggcttagctggagtaaccatttcagagctggtcgtttccccgcagctttagattccattttggtgaggaaatttacattacccaggtgtgcacttgggcaggctgagcgacctgagtgaaatgaagccaaatcctggaggtgcaggtgtgaggatgggtctgggtgtggggtggggtggagggctgaagaaggaggcgtaacattgtgtaaggttggatattaaacctactgcagcaaaaccaactctgcccgcttccccgggtatttatcatgcttaccttctaccgcacacaccgtcagtgtgaactattgcatagaaaagggttttccaacattgccaggtcagagctgattaagctttcacttaagaccaagagtggattaaactttgggatctgccctcctccggagggggagaagctggctgatgttcactgacatgtggctgcatggccacatcagttgttaaatattgagaaacttcagctgtcctgtgtccctgagtgcccatcccccatccaggacctcccacccccccacatttcctcagtggaaggctgctccctggactcatttcggttggtgggtgccaccgtggttcagtattttcagaagttcactgtagcctgcaggttatgccaagtcccttgacactgggtcctcatatttcctgctgctgtattttttccttatgagatagaaatgagacttgtcaaaaccctactgactctgttaggcccagcccaaatgtcactttgtctactaagactgccctggtcacctgtttcttggcccacctgacacttggtttatacctcttttatggaaaattatatttaacttcctattacagctatggcttgcaatgggggcgattttaccacctggggacatttggcagtgtgtggagacagatttggttttcacaactgaaaggggagctactggcatctagcgggtagaggccggggatgctgctgaagagcctacagtagatgggacagccccaccccagagaatgatccagcccaataagtcagcagtgctgagctgagagatctacaagcctccgtgtctgttcagctccttcctgggagctcccagagggcaggacacagctgcttgcatcttgccccaaccctctcctccaggcccgcaacccccaggaaccagggtgagacattgcatttagttggacactcaataaatggggctgaattgaattcatttagttaaatggaatcaaatcgaattgaacctaagctgccctgcagatcgttaggcaaatgcaccaattacctggtgcagtagcttagtctttcctttgcttcacaatcaagaagtggcctccgtgacctagactggggacttagggatgagagtgaaaattgaaaatgcttgcaagctgtggccttgagtggtttcagacacttctcatttattgtgcatcttaatgacacaagtaactctctgaccttcttgtctcaaaagtgatggggccaaaaacagccactgccccaactgtctgttgaggaaggttggaaaagtgcaggactgtccagagtctatactgagaggcagtgtggtatggagctgagctcctcagtgttctcacattggaacccacagagaagatgctcccatctgaactgtatgcccaggaaagggggcaggcaggcggctggctcaggcgctgcccttggccccaaggctgtgggagcagagcctgtcacaccagcagtgcattaggggcacactgtttgtgtgagcactctggtgaggcagaaaaaacatgacctgaagaggcagatgacctctgtgtggccagccccttcaccagcgctagctgtctgaccctgacctgtgggcttgccctcctctgtaaaggggaatagaaattcttccctgcgtccaggcaggggctggacttggtcagcttacgtgcctctccccaaatatactaagtgctctatatgcattgctcccctcccctccacctgcattcccattccacagatgaggccgctggggcacagagagattgtgttgcttgcccagggtcacacagctagtatgcaataatgaccggtttcaaactcagagtccatgccttggccgttctagagtgctgcagcatcctttctgtccacttctcaaaaatgcagcctctgcccatccttccatcctccatggggtcttgaaactcaagcctgctttgcctgggtgtttttaagctatgcttgcaatatgcgcagtcatctctgggctttttatgtgtcactcattgatgagaaccaaaactggacaagattagaagtgaggctttccttctttccaagattggattttctgttccacccagaacaacctgctgttccccagctgcacgccctggtttcaagtaggtctaaaattacaagagaatcaccttgctccaaggaagctggcatctctgtttcctgatgaaagtaggtactagagagtggagctacccagaaaccagggggtggcatgttggccatgtggaggcaaacagagctgtgttttcttttcttggccttcttaaagatgtatctaatttggggcatgttttgtttggttcatcttgtatctggagaggttcttcttttctccctaagtgacatccctcttgagcccacaattccctcttctcaaggtgagtaatcctctctctagctgttcataattgctaattagtgaacaaagaggctaaccaacaaaattagctattgggccagggtttaggattgaaccaaagggtggagaagggctttagtctgcttgttttttatttgtttgggttttttttccttaaaaaaaaaaaaaaaaaaggaatcggccaggcacagtggttcacacctgtaatcccagcactttgggaggctgaggcgggtggatcatctcaggtcagcagttcgagaccagcctggccaacatgcggaaaccccgtctctactaaaaatacaaaaattagccaggcatggtggagggtgcctgtaatcccagctactcaggagcctgaggcaggagaatagcttgaacccaggaggtggaggttacagtgagctgagatcatgccattgctctccagctgggcaacaagagtgaaactcagtctcaaaaaaaaaaaaaaaaaaaaatcgcaacaaaacatacagcccttccccactggtaatttatcataatcgtatctaaagtgttcttacccaacatgttcaccatttgaggaaaagttactgatgattccttatctcatcagctatggaggcctcagaggggttttccaaaggaaatgcctgacctcagcataggatggaagaaggaggtgccgttctccgggagggtgtgtccaccccagcccatctgccaccaggctggcctaaaagaagcggcgtcctcctgtgtgtgtgtgtgtgtgtgtgtgtgtgtgtgtgtgtgtgtgtgtgtgtgtgtgtgtctctttgtcatcttcagcatatccagtgcagaaagagatagaggcattcatattcagcaaatgtttcttggcatgtaattacatcatctctttaaaatctcattacaaccctttccatttattggaccaagagattgaggctaagatttacagacttcctctgggccacacctagtaagtggcagtaacaggaattaactatactctctaaagtcagtggccgtagtgttaggaatttacgactaataaatgccaattctgttgggaagacaaaaattatcatataagaaaggacttgaaagaaaggagaagtgctaaatgacgagtttctaagtgcactaggctttctggaaactgcacaatccaggttaaccgcaagcggtgggcagtttgtgggtgagagaacagtgcgcacgcccacatggctgttctgtgagatcacctcttgggaaatatttagaaactggtgcccactttcccaagtttccagcaaagcctacagtcactgtcctcactggaggtgcagtcagtgttcttctgggcccccgagactgggaaggcagattcttactccatttctgtgcctcttccactgccctctcttccctctgctgccttctccctttccttctgctctttgtagaaaataggtctgcagcagccactgaactttgtctctctttgttctgctcttggtcttacttcccttctttctccttccacctctcctggctgatttttcatatcatccccatgagaaagctttttgccttccttaaaaatcttctcaaaagtgaatttctgcttatggtttaaacagataccattgtcagcaggggtcagtgatgacccacccatctcctacactccttccctttgctctctggttcccacattcgattctgtttcctcccacttgctcggtccttcgggtagtctcagcttgccctgatctctaccacgtgaatggagggaaagctaagccgtccttcctggctttccagtgagccagtgggtggaccttcagcccatagactcaccttcctgcctatgtgagcatccagaaaacttttggggtgtgttaccaaggagacaatggagtatttattgtactaccttccttagactttcttatgcaacctgccctctttcccggattgctgtgatgctgcagggaggtttcttaaattaatcttgtcaaaatagccttcgaatccttttggagcaggatttttttttttttttttaaatctcacaagacacaaactgttcaagggaagaattaggaacaaagacaacttggggactggagagaacttggagagcatttagagaaaagcggggaaatgattgatgggttggaaaataggagcatggatgaatggtgaggggaatggagatgatttaactgggacagagaggctgacaggtgacctagtaataggcttccagtttgtggagggttaggacatggagactggcttcccactaccagggaagaaaagacacttaaagtgggaggtaggggagcctgaggctacaggaagaactccttatcacagggtctgttaattatagcaaggcaggatggatcacaagctcttccaccaagcagtcttcccagacgagagcagcactgggacggtggtagggatttctgtaagtcatccagtgcacagcttcccgatcgcttgtcctcagatagtagcgagatggctgcctcagcatctccagggacacgtagtaaaaaatacaatttcgtgggccctatccagacctcctggtttagagtttctgggaggaaagtccaggtgtctgtattcttaaaacacacacaaacacaccccacccccccccacccccccaccccacacacacacacacacaccccaccccaccaggacaaatgcagaactaactcattgagaaccaagaggctggtgatgtgaggaaagaggaaatgcctcccccggattcctcaggttgctgcctgcagcatcccgctagatcttccactgcccgggagctgctcaggagcccaggccacacctgccctggtggctccgtccagcatccctgctgggtcacttggaatggacgctggggcatcaaagctgccctacagctctgaagaacccctgcgtctctccctaatgacaagggtgctgggaaaaatgctcattccatgtttttatctggacttcaccagcagtcactgaagtcttaggtcacagttctgtggagttttccaacgggtccctcagacaccaccgctgccccacaggggctagaatggaatgagcttgggagtcaagagatgtatctgccttgagcttgagcaggtcattttacctctccccgttgcagtttctttctctggaaaaggagacacccggactggacagtctctgaggtccatccagctctacctttctgtctctactggctgtttgaagaattgcaatgctcgaagagtataaagtagattcagtgtaatatttcgtagtgaagtattttaaattcaatgttttttttttctttgcataacttatcctagggaagttgggaaggatgaggaaaaatatacgaatccactcgtctccagctagctcagcttgtgtgtaggcctgccgttcaccacacacgaccatgcgcaagctctctggtcccttggtggcagcataccaaactacagattctgttctttggcctcagaacagtcttgtgtatgttttaaatgtgtagcttggaatcaacgagtatttttcatggggagactaggaaggttggggggctgggatcattatttcacacacttatttgcttgtttcttgctgaattccagattgcggtggtactttaaaaaaaaaaaaagctccaatatcaattttaattttgcttctaaccttttggaccagccacaccctgacacttaaaaaataataatgaaatgttagtataagaaaaattgctagctgactatcccagccttcctccttagtaactaaacctgatttggggcacattgctacctagactgtaatagactttccagtgtcctgcatggccaggtgagctctggacgatgatagagataaactaaattactgtaggctataatttaaggaagcctcctttaaaaaagtaaggaaaggatccttttttcctttctcccttcctcccttcatttctccttccctcccttctgcctccctccctccttcccagggtgcagttgtaatggctggagttctagcagccactttggaccataagatggaagccaagcattgaggatggcaaagcagaaagctgaaagcctgggacaggatgaccatggggctgccatcccatcccaggactgtctcccttcagacatcttttatgtgagagaaaaataaagccactattatcttttgttttatttatgcagctgcaccaaattctaatgaatccatataagttccaggtgagctggcttagatggtgagaaccaaggtcaaaggcaaagggtagccctgataagcaaatgccactgctgagttgctcagagcagtagacttttgctataacatagcacaggaaaggagagattttggagacagatggagtgtgacgtcgagctctgcctgagaccgactgtgatcttgatcaactgattgtcttgagtctggatttcctaatttgtaaattagagtaataatctccaccccgcaggccattcattggcattagacatcgtatgtattaggtgtcttgtttagtacctagcacacagctggtgcttaaaaatagtggctctgtgtgtacataggcacatggtatgtccccctggccacagacactgtgctatgcgctggggacatacagaggcatacggtgtagccccagctctgagggggcgtgaaggccactgggacatctccagtgttgtagcatggggcccaggtatgcagcctgtgtgtgccttcatgctgtgatgcaggcttgggaatgcatcccaagcctgtgtacagtgccagagattgaaggatcccatcttagactggcacttcttggccttcactcacgtgggcctgtggctcgggatacttcccttctcctttactccttctgaatcctacatgtttttgtggcacgcggaagtccttcctcccccatagacccacccaacctagtctagctaatcctcaacattgcactgagcttatttcaagaccacacagttcaagacaacacttgttctcctgctggggtgcatgtgtgtcctctccagctggaccataatcctcctgaaagcagagccccgttctgatcgttcctttagtgtggaaggcacagtaggcactcagtgttttgatggagaaagctgagttttacagttaagaatatttttttctgcgagggctcagatcaggcctacagccctctctctcctgtggctgcagactgtaatgagggagaatggaaagagagcagggagggatggctcagccccaggtgcacacatggcccagcccagattctaggcccagcgggcatcaggacagctgtgccaggcagacacaggagagccttcctctgacccaggtgtgaactggatgataaaagatggtttctcaccctaaggaaatctctacataaaagaagttccctcatcaaaatcctcccagtggccgtaacaggctgttagtcacatgcaataatggcctggggtgagtaggtatcaggcagctgggctgaactgcctccttccatcaggagtgagctcttgcactcccacatggtcacagtatggccctccagaggaacactcccctcacccaagagccagtcctgcatcctcttgtcccagttgtgccctttccctggctgaccatagcattgtctgctcttggaggttccccgtaaggagacaagctaccttggatggcttcctgatcaggggcctgcttctccctggaaacccaccttgtctcatctcataatatactgaggaggatcttggaaaccactaaaatgatcattcttcccctctccatatcatttctatattcctgcttttggaaactccacatcattttgacctggctcaaccaattaggtagtccactccaaataagttaccaacccgtactcacaaaaccactttcagctgtcggaggagaggtggctatctggcgctgtttgcagatgtctttctcttctgttcttgttgaatccttccccagtttgctggggttcccagtgggggagtgcttccacagtgcccaccccaccccagcctctgcctctccccacccttcctgcttcctgttttctagagcttttttctttctttcccctgaaggtgatctctgtataagaatagccacaatatgtgtgtgggaggtttagcaacataacctggaagatctcttacagcctctggagtcttgatttccttgagtgtcttggactggataatggtgtgtattaaggtttggggtagggggacggtaaagaatacctctgcttcttcttggacctgtcagtgaagcacagtttggaagggagaaggctggggatgttcaaatagtaggcagaccccctgaacaacagtagcaggtgtggtccaaacttactggccggcctgcaggccaggaggccagtgccatcatcccctcgtgcctggtgacgatcagcccttagagctttgagtgccagtttagcagagagggtggactgatccctggtcttctccaaggacagcctaactcatcagtcagcatcccagccccagaccagccccaaggtccactgcatctgatgtgagtcttcagacctaaacgagaggtgaggccggagtgaaggcccacactctccttttagttctcttttttttctccattattggcatgattttgacagtctctaggtgaatgcctataaggacaaaggaaataaatttaaaatgtgaatgcaatagggaaaatgcaatttttacaggcgtctctgagagttggttttcactttaagacctggcagtggcagtaaaagtgcacaccttgtttgaaaggtgcagtgccagtgggagaggctgggagtggaccagacatctatgaaatccacactgttgtagaaacctgtaaacccggtgtggcggcccagtgcagagacttaggatacaaagagagaggaacttaagttatgttgtggaaatgtgacttcttaataccgttcagaaaataggtacagaggcaacagtcccaatcttctgctagaaatttcactcggctaaaagcagaacgtttaaatacactcttgccatgggctgctgagaggtccagctctcaagaagtgggagcagctctagggatggccacgctgggctcacttccgagaaagaggaagagttagttggggtgaggaaatcatggaggagaaagaccagtcatttcggggctcctcgtcctgaaagcagagactgccgtacagaactcagcccacggaggtcagccacagacacctcaggaagcacaaagaagagaacgatcttgtgattccaggagagtctctgaaaagaaggtagttcaagaagagtagaacaagcaggggcttgcagagaatgagaataccacatgggcctctgcggtgaatttaaggcaagaaggagaatgaggaagcaacagcccctgcctgtgagtggcctacaggctagaaacagaacagcagacgctgccacaaaggaattgacccaatgcatttacaaagcattccagtctttcttgtccagctttatcccaagtagtggaagaacctcctgatactttcttaaagcttctgacagtgatctctgtgaaattatggagcgtgtgtaggggccagagaagcgaaacattttgattttctacagctaggaggctgtaggagagtaagctcgatgttaattcctggaagactcttagggtatattctttaaacaatagtgtgtgtgctttcaaaagaaatcggtaattttaggaacatggcaaattaactgaactttcttttattgtaggtctactaggtttagatcaaaagaataccgaagatagtgttgattttattaaggcactgaggggcatctatcatgatttcttttgaaaaatatggagaaatatgttaataattgttaggccaacactggcccaaaaatgcagattaacagattgatgtcagtttggagggaggacttcagttcattgtcatggggctcaggcctagtcagcatgtctaccactggccttcatgaaattgcaaaatagaaacttaacgaatttgttgaagacacaaagttgggagagatgactaatgccatataaataatgcatagaaaacaatatttttaaaatccatgctggtttttaatttaacatgacaggagaccaaatatgcttgatatacttcctaagaacatataaataaagtaccataaatatgccaacaagtttgaaacttccaatcacattgtaaatcaaggggcgctaaagagcaagtggaattcctaccagtgggaatgggtgaattgagaggcatttttctggcctgcactccacgtgtctatccactgacagacccaaagagctggattgttgaataagatgtgattcaggcagaaaaatatgaagacatatgaaaatatgcaaggtctcagaaaataaagcatacatgtcctcctccagagacaatgaatcaattaatttttaatgttccaagtgattgagatgaatgaaaatccaggaccccagcatagtataaaatggaccaatggtgaattgaaaccaattaaatagagctgaggcatcctgagcaagagcacaagctctgggagctgcaaatgagcctcacccctgccacttactaattgtgggactgtgcgagagttatttaacctttctgaacttcactgaacaggtgtgatttctgtgaggattaaatagaaaatgtaggtaaagtgcccaaaattacaactcttatcaactttattagtattatttataaaaataactatgttaactatagttacaaaataaaaattagaatttagttttaaaaataatattttgagaaataacaatataagaaattgcctatataatacaagactaaattggtaatgacaaggaaatattgggtgctggagggaagcaggtgttacatgtattttaaaacttacttgtgttaatgaagggaaccatgagttaaagttttgttttgaactttgtaaattatagaagtttaatttgcaaatgcttttaatacgtataaaggttaaaaatccgggtttcaactttcaaaaactcaagataaaacaaaagtatactctatgacagcagtccccaacctttttggcagcagggaccatttattagtctgttctcacactgttataaagaactacctgagacttagtaatttatgaagaaaagaggtttaattgactcacagttccacaggctgtacaggaagcatggcctggaagcctcaggaaatttacaatcatggcagaaggcaaaggggaagcaggcatgttttatcacagcaaagcaggggagacagagagagagcgcatgcacaaaggggaaagtgctacacactttcaaacaactagatcttgtgagaactcacttactgtcatgagaacagtaaggggaagtccgccccatgattcagtaatgtcccaccaggcccctccaccgacatgtggggattccaatttgagatgagatttgggtgggtacacagagccaaaccatatcacaccagtctcatggaagataatttttccactgactgaagggatgggggcagggttttgggatgaagctgttccacctcagatcatcaggcattagattctcataaagagcatgcaacctagatctctcacatgcgcagttcacaatagtgctcgagctcttatgagaatctaatgctgagaggaggcagaactcagggagtcatgcttgctcacctgtagctcacctgctgcacagccggttcctaacaggtcatggaccggtaccggtccgccattgtggggactggggactcctgctctatgaaacaaaaaatgagaaagtaaacacacagatatccagaagcataaaacaaaatgacagaagtagggttgaacgtttaactatgctaaaatatgtaagtgggttaaacactcttattattaaaagtataagacttacagatgttggttaaaacagaaaatgtatccatattctgtacaggagacactaaaacaaagtgttgcaaaaaggctaaaagtttaattaattaattaggaaacagtatcagaatagatttacaatataaagcagctggtgctataaaatacaaaatttaattaatttacctctggaaatttagaaataaaaaagagcaaaaattaataaggaaacataatagcataagagaatgaatgctattcatagtggtatgctaagaaatttgaaaatcttaattgtaactttctagaaaaatataaatttcaactttagataatttttttcaaaatacagaagaacattaaagttaaaaatttatttaataaaattagcattatcttgacaaagatgtcaccaaaaaagtcttagaataatcttatatatgtacacagatgaaaaaagaaaaatgaaataaaattgaatccattggattcacagttaggtaagacacagccaatgaattcaaggactattcaatgctgggaaatttaatactataatatatcacattggtaagtcaactaaaaaatgcagcatgcaataaaactcaatatccattttaaatacaactcttaaaatactaggaatagaatgacagctaatatgataaagaatgtatctcaaactaacagcaaacatttagtgatgatgtcctggaagcatttcctttaaaatcaagaacaagaaaggaacgtgcactagaaccattgccagtcagcgttgtgaaaggtcgaggggctacaacaaagcaggacgtggaaaggaagagagaaaattatcaatatttgcaaatggtgtgattatagtcctagaaaatctaactgaaaatagttagcattaataaaagggccccagaaacgtgactggatatgacataaatagtttaataatcagtagtttttatgtaccaaaaatgaccatctggaaaataaaatggaaaagaattcctatttacaacaattacaaaacttttaaaatgtgcttagggaaaatattctaaacacatgggactgtatgacaaaattaaatttaactaaaagatatagaagaacagttagaataaatgaaagcatgtcgtatttctataggaaagattgaatatctgaagatgccaaatctttccaaattaattcatgagtttaagaagaaccctaatcaacagcccagggtgtattttctttgtttatattttggtttgggcattgtttgttgttttggtggggagtggaaaggagagtgcttagaaaaataattctagaatttatctggaaaaataaccagaccaaatttaccaagaaagatatgtcatgagcacagtgaggaaaggataagagacggcattcctacagatgaacagaatggtgcgggtaaaggaatccacggacagagctgtgtgaaacaaacaaccaggaaacagcctctagtaatgatatttgttggggcataaaataaaatttttaaaaataaatgtgtccaaaataaccttgtattcaacagcaccattttaaaagtagaaggccagagccataaaataatgcatcagtcaaaggcagaagaaaatttgcatcctcctatgtgtctccaaagtagcatatactgtgtactagaaaacaaaatctgttttcccttacaaaaccagtttaaaattcccctcaatttatgtatggtaaaaataactttaaggtgcttctctaaaaaatgaaactaatatgcagtgcatctgtggctcatgagaacctactatatggtaaaggaagcaaagaagttttaaggaaggtgggcgagggcagggactggattggtaagtatttggaaataaaataactttacatacctttttttttttttgagacaaagtctcgctctgttgcccaggctggagtgcagtggcgcaatcttggctcactgcatcccccacctcccgggttcaagcgattctcctacctcagccttccgagttgctgggattacaggcacatgccactgcaaccagctaattttttttttgtatttttagtagagtcagggtttcaccatgttggccaggctggtcttgaactcctgacctcaggtgatcctcccgccttggcctcccaaagtgctgggattacaggtgtgagccaccacgcccagcctacatacctatcttatacatttagacaaagcaaattacaggtggattcaaatagttaaatgaaagaaaataaaccataagacttgggggaaaaagactatttaactgcctccagaattatggaagactttataaacatgaaagtaatggaggaaggcacaaaagaaaagactgagattcaactcataaaaatagaaaacttttacccacagaaaaattacagaaaattttggaaggcaaacacacactgggaaaatgtttattaaagtggtagacacggggtcaatattgctgctgtataaggagatcttagaaatcaattaaagaaacacatccccattagaaaatttggcaaaggacgtgaacagatttattcacaaaatataaactacaaactggtaaatacattttgatttttaaaatcagcctcactagtaaaatagaaacataaattaaaagaagatgctatttttcacttaataaagtaacacagattaaaaaaatacattagcaataggtgtggtaaaatgggctctcatatactatgatagaaatagaaaaaagttataacctttctggaaacaatttagcaatgcatatcaaggtctttgaaatgttcataccctattaccactaattttccatctaggaatttgggctgaaaaataattagacaaagttttatatttacgtataatgatgttcatttcagctcatgtataacagcaagaaaagaggagagaacctaacatcaaaggggaatgtttaaatgtgttataactcatatgatgagctaataaaacttatgtttttgaagccaacaagttgaaatgctcatttcacattaatagcaggatataaaatatatggacagcatatgaatttgaataaagtttaaaaggaaaataaatatgcatagtatcacatttttgtacagtataaaaataaattcaatagtatcttaataaaaattctgggccaaaactaatgagataaatttagtattagaaatgctaagttatgggctcagcctcaaaaaataggaatgaaagaggactaacttaactattgcatttatgaaaaggatcggggggatttcactgccccaggcttggtgttgtgattgtagtcgaagctgacctgggttgccttggtggcagtctgcggtgtccaggtggggagggggcagtccctatgctctgtacagtcaggctcgtctgctctccaagtttaaagagaagcaaggtgtgtcctcctctcatgttggtcacattcagtgagggaccccaggggaaccatctggaaactgttacataaggaactgcagaaggatctagggatgttttacctggaaacaaggatatttaggggcaatggaatagctgatttcacatacataaagggctacatgaggctgaaaaatcagactaattctgagtagcttcaggaagcagaactagattttgggtaggagtgaaagggagaggcaggttttagagccatgtaaggtgtagtcaggtgttcatcttgcaaaatggtgagctcaccaggacacaaagcatccttgaggagtgaagatgagaggcttcatcgggcagaagttggaatagaaggcatcaaaagacccagccgtaggatttctgcagtcccatcattgactgactggaggcccaggtgggcagaaagaaggcgttgaaggggcatagactcctttggccattggttttcaacctttgctttacaacacaagcacctgaggagcttgttaaaacagtgctggaccccacctccatagtttctgattccgcaggtctcaggtgaggacctgagaatttgcatttctgacaagctctcaagtgatgttgctgctgctaccactggtgctccaggaatcacactttgagaaccatctccttaggtcaagagcaagaaataaggagatattcttaagcccgatggtacagagacctagaaaaaaaatatggcacacaggaagcaagcacatactaaatgacatatggcttttttttttttttttttttttaatctcggactcttggacaatagtgttgaaacttgtggaattaaatcacagactggaggccgttctttccagatccacatttctacctggatgatgggctctgtcaccaggccaaagaaattgatgttgagtattaaaagcctctaaggggagcggatgctgcaattttcttccttcccctcttagatgttcctagatggtggggaagttcattgtcacttagaaattcatgaaggaaatagaatattgctcatggacttcagaatggcccataattagctcttttgggttttgttttgttggttggttgtttatcatttgttgttttactggaccttggaaggagtcttcctcagtgaaacccctcgttataagaacagatagtatatgatgtagacaaccacagatgggacccccaagtttgatgatgtcctcagtgtcctgcagttattccaacaaagatgcacaattcccgtcgtcatctccattcaaagtaaggctcatttatttgagctttcagctgattggtttaggaagagaactgtgtacagcctcccccacatctccccaccccttgctgctctcttcctgagctcactatgtcagtgtgagcagactgtgcgcctaacacaccggagtctgttgccatgacgctggggagaaatctggttcctatagcaacatcaggttgactcgttgcaccttatgacacaggcagatctccagcaggggcttctttgatctccagttaatccaggagagatggacacatgtagtactggaaaatattacattttcccacaacccacctaatcctgcctgcctgcctttcatcctccacattaccaaaataataataataaataaatccgcattccctttttttttttggcaacctgaaaaaataaagcaatggatcactttaatgttctcagcagattaaaacatagtttgagggtcaatccctatcgcctccctttccaaggcccatccatccgttagcctgccccctggcatgttccttgaggcctgtccatctggcctggctggctggtgagaagtcctgtcagcctcaggggtccggggacatgccagtagtgcaatggcagctccctgggcaggcctaagaggccaggggctcgttagcaatggtagcagatggatgcgggggcagccccaggagaggccagcaagtccggtgccgagaagctccttgactcaccatccaaaggaatgcacggtgttggcttctgtatgtcacaaagtgggcagccagcctggggcactcggcacattcctggtctggtctgtggcgggagaagtgacaaggaactggatcgttactgacaggaaagcatctcgttgttctttaaagagactttcagcgaaggaggatccatgattttccccaacccttcatttgagtgcctttcagccttccttggggaaaacatccatatgttttctacttatattacttacttgtcacccctcattcattcagcaaatgctcactgagcttctccatgtggcaggctccgttctagaccctgagcactgaataacacgaacggggtttctcctctcctggcacctacattctcatgggggagacagataataagtaaagaaaatgtcaggaacatgaatatacaatggggagttttgggggaggctgcaaagtgagtggtcggcagaggtctcctgaggtgacactgaggcccgactgccctgaggagcctgccctgggacaagctagagagagggtgtcccaggcagcatgcagaggccagcatggagcgctctgaactgggcagagcaatggggcaggagtttggcgtggattcaggggccgcagctgtagggcttgtgagccaggggagagattggattttaagtgatagatatgggaaccattgaaagtatttcagaagggaaacaacagaattatattcgtatttatgagtttgctccagctgccttaacaaaccctcttcaagcccattttccttttgcctttccattagtggcgattaaaaaaagatatttgccacccttcttaggcttgaaggtgatctgcaagtcaaacctcatgcttttctccagtatcagtaagctcagtcccatttttcctctcttgtgcatgacgaactttgttatgccagccttcaagggatattccgaattcctttttcttagaattctagagccagcgggggccttacagatcactgggtccagtccttattttacagatgaggaaacttggttgccacagtggtcaagggacctggcccacatcacaactccgctagccagggctgggcctctggtgctagaacccagcaccctcttccgccccacaactagtagacagtagactagtagtcttcccacgtgcacgtttacttaccagtgctcattatttcttctcttccttttctgattcatctctctgccttcctctggtcctgtcattcttccctggtatgctggaattttttagtaatggactgttgattgcagtatgtgggaaatttggccataagttttggttctatgtggttttttattgtggtggcaattgtttttgccattttctgctttggtgttatttgtggctcccattggggcctccctaagccctgcttattttcccatgactggggactgggtgttattgttcgtaactcaatattccagccatggcattcaaggccaccaaccctctgcctgtctcaatagcatatcacagcccacgccacattggccttccgtgggccaggcctcagggtgggaactcagccagggtggttttcctactctgaggcattggtagagcggtcagggctccctgctggcttacacccacatagcagctcctaactccacagtttgtcttcccctcttctgtccactccagctcagggccccttagccattcactcagcagacaaagaatactaatagtaggtgataaccactgctgcagggatgacacattagcattaggtgacaaataaaccatctccagtcaacattatccctgctgcatccaaccagcacagccgggaaagcaaacaatgaggcagaagcgcgtttcctcactctgaaaggcatgcatgcactggaagttgggttcattggagagcagggtggcttcacatcgggatctgtggcaggacagcctcagagcttggcagtgttgtctgggaactgggcaatatcaataataaggtgcttccagtgacagtctacgtcttcatctttacaaaagctttcagagataagattattgctccagttttcagatggggaacaaaatgagacaggattagtgattctttcaaggtcagcaggctggggaaagtcagggttggaacatgaacccagtgcagggcgcacttctcacacactgcccttctctctgggcagcagatgtgcatgtgctgagcggctgccaaggagacaggatggttgagactctgcagaagaagggctggcatcttccctgtgctgcctcagtgggacaggttgggctgagatctgcaaggtacaagcagggcttgcttggggttctgatgagaatgatgcccagtgaatgatgcccggtgtcgtggctcagcagaacaggcctggcatgaggctcaggagatgcgtttcctgggtctggcccaccttcggctcctgtggcactgggagtactcttaagtcttagctctctgaacaccaagtgaaggagttagcctggaggtccccaacgttacactcactgataccattctatgatttacaaagctcttccttgatgatcagatgtttcttttccgaggtatttcaacttcccatttatagttagtattgaagtgccacctgtgggttttccaggccgctgtctcttttctttatacatcataccctaaggatgcttattattgctgctgttgttaaatcaagtccttgtcttagtatatgtatcttaacatattgagttagagacagtgcctaacttgacaattctgacagtgttgatataatccatggagagtctttagcccactggttctgcccagagctcactggtaactcaggctctctgcatggcaaagtggaagacgttgaccacaccacttgattgggagctgtcttccttccctgggatgaaaccagtcaggaccttctcacatgggaggagtatcaaagactaaaccaacctagaaacagtccaagaagaaccaaacaacgaagcaagcaaatcaaaacaggggaagaggacaagcagggccccaggcagtttggctggtgcccagcacagggcctggcactaacaagtgtttgagaaacattgagtgaaatgacatggttgctcagtagaaggagcagccatgctcaaggccagagtcgccccttcagtctcagccattgcttggggaagtggtctgtttttgccattagagaacacactgccatggaggacactctagatcagaagtccaggtcggagtcatggctttgtgacctcctgtgtggctttgggcaagccactaaactctgagcctctgtatgtgaggacaagcgcccattcttcttcttattgcagagtcctcataaactacaactggatgatgccccctgagtacctgtgcttgaggaggggggcaaatagcaccgagatggtgtcttacccacctttgtatccccagcatgtggcacagagccctcactcattaggttctcagcaaagatgagtgggtgttcggatggatgcacagcttaggcggacaggtggacgaataaatgtgcaaggaaggttctgggagctgctggcggcaaactttgcttgcttcccaaggattgtcctacctttctgtaataggctagggggctgtgagctgcagtatatttctgctcacaggagccctttcccttggggagctatgtggagggcaagaccaccccaagaaccccaacatgaaaccttaactgggattctgctgctctaggctaagcaatcctacattcttgactagaagagtgtgtcttaggcatacattgctgcacagaaaaccccccacctcctccctgcttcacagagatggggtgaaagatggtggtgccctaagaatgcagaacccctgcgccacacaaagcatgctcgctacgcccactagctggccaggaatggtaggaatcgcagggaccatgatcaggccttttctgctggggccacctgctgctgctgttgtcacgttctgtgctctgccgccatcctctgcgggggtggagccagcatcttggcagccccagggtaataattaggggaggggcagctccccagctggcgtggtatttgaggaggggcctggaggagaaggaagggctgggacacggccaacaaaaggagaaattaaatgggctgtcctgggagcccatagttagcatttaaacaccagcatgagctgtgggtttcactgagcagggctgtgtgtggcctcaatgccctcctctcccggcccccgttctgtttgtgagcacaagctgggaggactctcagcagagccctaagaggtgatgttgtcatgccgaagcccaggattcaggggctttcatgcagtgcaaggacaaacatggcgaacaccacatgcacccagctgcaacagcgctgcacccctgacctactcacagccctcaaggaactcaccgaccagcctagccttacagcggctatcacaggtgtgctgggcccctgacgtcgagggatttagggttttgttttatttgctgtcagcatggttcgcgttgcaatttcgattgtgggaagacagccaggaaatactaaagaaacaccccatacctccttcaccacagccacaggtactgagcattgagcacacgttatatgttctttatctcctccagtctgcactgctcacttaaaaggtggggcgtattatccccgtttcacagctgagtaaagtgaggttcacaagaatgttgtggctggcccaagttcacacagctaatgaggaggggaaaggatgccaagtgagtccgcctggctcctggagctccttctgcttctccatgatttctgaagaacacacgaggcctccctgtgtcctgtgggagaattcactgtctctactacgtgggaaaatgtgaaagaaggtaggcctgagtgctcccgtaagctttggggaatgagagctgagtgaattggccttactaagtgatctggcagtaatctggtggtcttgagcctagaagagggttggggtgagtgtgaagagtatgatcccccgcagagccgagtcatgacttctcttctgccaggagctcactggactcccatacccttctttggactttagtttcttccagtaataatgattataaagtctagaaataatacgattaacaaccacaactgagtaaatacttgggaattagtgaagtgctaggtcttgtgagcagattctagaggtagaaacagccccagaaacacaagctagaaaaagaggaacagcttccaggagagttccaggcatcctaagggaagcacgggcctctgcatgtggatgggttcgaatgccagattccagcacccctctatggcctctgcaatctgcagtcttttaaaactgtttttacattagaacatcacagggttggactgtgccgccacaaaagcgcctgtcttcattacccatgattcctcaaatcatcaaacgtaagcacatagatgccaaccagtgtctacggggtgtaccaagcacaggcccatgggagccatctaccctgtgcgggcaagaggggagcagttgtctatgggaaatttaaaaacaatcataaaattcacagaaagatggtctactttgtattgtcatcatggcctggccattctaaataaggtcggggataaaatactccccgtgggggaagagtgttccctcaccacttcacaggctactaaatcttcattgctctcggccattgcttggttgtccttgttctttttgtttgtttatttgggtccttccttccttccttccttccttccttccttccttcctctctctctttccttctttttttctttccttttcttttctttcctttctttgccaataggccaccgtagtcagtttcatgtgtcttcctggtcaatcccatgtttactgcacaaatttaggtttcttttttgtggtcgcatttaggaaactacctagagaatagtgagaaaccacaggagggaaggagaacagcgagaaaaatactgttttctttttgttgtttactcataaatgtcacagaaatatttcagttcctttttggttttgataagtgcttttttaaaccaagtcctaaatcaagggcctctcttggcaatgtccctttgacagaaccgagggagggtggcagggcagggaggcacaagctgcagaggcacttgtactgtacaattttctgggtcctgactgataaattattgtgcatcttgtgcgtgctctgacatgcagtacaatttgtccatgtaacggtgatgataggctgtcccgggctaataatcatgaaccctttatttagctccttcagccttttagagaaatcttaagtaaccgttcatatccctttatcggttttctcttccacattttagcataagtggaaaaagcttttaaccctgagaattttactcaccctggggctggggacaaggaagaaggcacgttgttaaaagtgtacaggaattggaggatcttgacgctcccgatagaacagctttttcttggtctgcctcctaggagtgtgaggctgtctgggtggtagagattgtccagtccatctctcattttactggtgaggaagggatgcaagccctgagacgtaagtaactggcccatggtcacatggcacagtcatctggaagtgacattgagcttccttcacccattacagagagcctgccatgatgcgggacataataatataaataaagacatggccgggcgcggtggctcacgcctgtaatcccagcactttgggaggccgaggcgggcggatcacgaggtcaggagatcgagaccatcccggctaaaacggtgaaaccccgtctctactaaaaatacaaaaaattagccgggcgtagtggcgggcgcctgtagtcccagctacttgggaggctgaggcaggagaatggcgtgaacccgggaggcggagcttgcagtgagccgagatcccgccactgcactccagcctgggcgacagagcgagactccgtctcaaaaaaaaaaaaaagacataatattaccagctctcctttggcacaggtcccctggttcccatccccacccacgtgatggtcaagtcagcttaagcacgtgttcaacactctgcccaagtggctgggtgtcccttgtatccttttctgtgtccaagttattgatggtagattgtgttctctggaagacagatgtcgtcctggtgtgaattgtttcctgtagcatctgtgtagtctaaccctaacttgcatggtgcttgcatggctatttttggacttggctttgcaagctttaacacgtgacgctgcctgtttctttacaggcacaatcttgcaattgaggtgactaaaaagcagtacctggacaatggtattaggattcaaatatagcttctaaaagattggaacgatagcaagagggcatgcaggcattccatctgtgtgtttaggtggtagcaaggagcattcagttgctctctgtctgcagctgatgtttttcacccctctgggagcccggtactgacctcttctgataaactgggctcttaataggttggttagattcccagtgttcccccatccctctttcatcacatacacaaggggtttgtccaagtgagtatcacaaaggttgttcttggcttaaggctggcacgaaagggctctgccagtgagcaatgttagaattaaagacacaataatactaattaacttccccatgcctgtgatctctgcatttattatttgtgtagagataaagccttaaataacatgactggcctctttgggggccctgcttgggagtgggtggggggcaatgtcctcattacagcacgtaagatggatggtgtcctaaggcagaggcacatcaccaaggatcacctacggaaggtgcaacctccttcccagctggcccgtgtgctttttcccagcagcacgtgggatggggagggggactgaggtgtgtgaaagaagagaagcaatttccagggatgtggccctttgcaaggtctccacgtccatggccatctgccttccaggacctgctgtgaactgtgcagcagacacactcaagctggctgcctgtggttgtgggaagtccctcactcctctgtcctcagttttgtcatctctgaatggaggaagggaggttagatcaggcttccaagagtccttgaagttcctgaaattatatataaaatgtgaatgtgtgtcaggcatttgtcaggagctaaaaggccattgcctgtgattctcagaggtccctgaaccaaaggctaagggccaccaagtgagatgctccccaaggatccatcttcctcttcccgattatgattttagaacttccaaacctaacgtgtgttgtcagctcagacaaactcagcattcaggttgtagagacagatgatggatactcggtcagaaatgccctataaattagctgctttaaaagtattgaccaagtagccttccaggaaagttccccagatatggtggttctggtgttcccacctcatctgcaacagccctgggaagcctggctccttgcctccaggttttcctcgatgtaaggccctccaccccaggacactgtagcaatcctggggctaaccctgaagaccatttccactattgggcagccttggtggtttccttgtcgtagagaactaacccagtttccccagactggctaccttctcatcatctcaccatctctagctttcactcagatagaatgatctcagagcaatcggcagcatttctcatttggaattttactaacaaattaataataatgactttgactatggggatgcttaagaaaatctcccagtccttggaggtatcctgggagaagatagaaacaactctgagaatcagaacatctgggaggattctgcagatggatcccagggacagcccaacaatcagagggccctccttcaaagcaagtgctgcctccagcctggggcagacccatccctctctgtgtcatttgttttcccaaacattcccttcttaaactggggttcatgaagtctatagatggaattccagagggtttatgaacttggagaataactggatctttattatcacaggcttctagccgaaatttctcacggtattccttcgcaagtatagacaacacaccacaatagcattagcagtttctgttactttgtccaccattagaaaccatggatattttcttatcacgttaagatggttgcaaatatctcaaaaatattgtttgctttcaatactacttcaaaattctggtaatccactagattttgttatttaacatattatcaaagaagcatgcatatttgtgtattacaaaattgtctttaaatatttttgatatctatatttcaacataactggctttatttgcaatcctttatttccatttaagaacattattctgagaaggacctacagccatcatgagaaccaccaaaggcagccacagcacaagaagcttacagacttctctaaattggcaattcacatttcaatcctgtgctgcttgtgtctgaatcatatcatagggggagctctgagcttatgtgaacatcgaggctgtgagagacagaaaggagagatgtaggagccaaccttgtgtgtgctgagattcgaaaccagtcatatatcccataagcaaatgttcctgaactggcaaatcccagaatgtattttgccctgggcaccctttacctcctcattaaataagaaaataacccatgagtatttgaaaggaacttgcatcgatgtggaactgactgacttagaatagagctcatccgagatcttgagatgggcttattgacacaaccgcctttcagctgttcttgagagtcccacaggatggggaaagccttggtattagtcactgggatcagagctgggaagctgcttagctctgggctcagcaggctggaccaaggccacttgtaggtaagagaggcagtgttccctaatgcactctagatcagctggaactagtttgtaatcctggattcaagtcccagcactatcattaatgaactgtgtgatccaggcaagtggtttatcagccttctcttccataaaatggggtgctgtgctgtgtaggtgtgcctggcttgtaagcactaaacgagtgtagctattactatgatcatatgcaagcagcacctgtagcatttggaaggctcaggaaaagaagggtgggtgggagcaaaggcaaacaagagcagtggagactaaagcgggttgtctcgtggcgatgcttaacctaggggcctggaatttccccctttgcctggtcttactgtcattggaataatcgtaaccactcctgggtggtaagagatcagcaacatagctgtagttcgttgggtggcaggaatgtgccctttgtccttggtttctaagtaatgatgtcttcatgtccggttgagcgaggggtcagcttcaaccctacgataaaccagtggagttataaatggaaagcctgaattcccagacagaggaggcgatccaatgagacagcagagtaagtagggaattttcactgcctcgtctgcaatgataatgtgaatagcaataataatcatcctaagaaaggattttgtctcagagccaaggcaaggaaaagagccttttcccatgccttgctggggagagctgaacactcaaaccacgtcaaaatagaaggaaccaaaaatacagtgaagtaccctttgccccagtgagaagccagtgcaagacaacgccctgcagaatgggccagagggcagaagaagaggccagggcccagtcctgaatttgtctgttggttctcacttcctcctttaatcatttcagaagagctgttaatgagcaggaaatctaattgattagcatttcatcctggcttccctttctgccaaaggtgctaatgagcagggaaatcacagatcctccgggtgcaaggtacttgagaggttgtgaatgcatttgccacccctacatggagaacctcatctgaacctcagcaaactgataaggaccactctgatttttaaaaccctccagacaagctgccttccttctgtggatcacacaccacccaggttagcagcagtgccaccagaaacactgttgcactcaagttttctcgcaggtgactcatctgcatgctccttggcggagaatcgcgggttactgtactgtctttgtgtaagagttcttcatattctcgaagatgtttgttacatcttgtttctactgtctttcctccaggttacacattgtgcgtctttcaccctttctgtgcaagttgttctttctgaccctaatcaccttatgttgttggatcttactccaagttcatctactttggtcgtggattcggaactgagcctagagtccatgaaggactctagcaagaatgagcacaattagaggtctcctggcaccctgttgttgtctcctttttttctttctaacaaaagcccatggtcagtctctccagttcatgactctttttcaaccccagcctccctttctccgtttgtgtacatgccctatttttcttttcctggtagacaaccctgcacttttccttctctgagcagcaacagtgaaagggaagggaggtggagggagagtaagccacatgggcaacctgcaacctgggtctccagcctcttgcagtcttggtcctcaccgtggcatagtatagtaccagtagaggcactgcagggacagatgaactccatagcaaggcattgcaagaggcctttggagaaattcctttgcaatttgagcaaagcccactccttggcttagcaaatctttttactttttggtctgctagaatttactgcatgcgtagttatccagaaggtacgtctctgtcccattcggctttattagacgccatctggaaaggggctgggagtggtcagcctcagggaggggagccaactgaccgtgaaaggagggagatgagagcgaagtaagcatagtgctcgctccccaaggattgaaactgcctgccccgagctgaagacttacaaagacgtagtccagattcccagagaaaatgaggctttatacccataacaagttgtaatttgagtcaccggggaagttaagaaagtgaaaacatgagcaaatgccagtgtgatggaatcagagtctccatgctggaagagacttcagagggatctgcttgagctccctggctttatagacaggaagaccggccccctcagatgcacacagccaggtactgcacggccgggccagaggcttttctgatgcctgcctccctctcccggcaacggaacctcatcacctagttctgataggaaaaaaaaaaaatgaggtgatcagaaaacaacttcctcaactttctcagtctccaccagcaactaaaattgttcctgtatccccctcaccttatccacttagcacccctacacccaagggcagctaggacccgctgctgtctctccatgacctccctccctctgtagccttaggtaggcccctggcagcttttgcctggaaatttgcaacagtctcttgacgggtccccctgcctccctccattcttagttcacctgtcactctgtggctgcctcacccatctaagaagcaaacctggtaaaattgcttctgtttaaaagtcttgaaatcctgcaatggcctcagtggcccctaggataactataaactccttaacatgggctacaaataggtggttttcacccctgggtgtatattagaatcacctgggatctttttaaaattacccgtgcctgggtctcacccgtagtgactccatagagtgggcctgggtggggccagtggtgtcctacagctggaaccagccccagcgactcaggagaggccatcgcttccaggaatcttatgagtgggttgttaaatgaccattattaaaaattatacaaacttgtaagtaagtacattatgttaaaaacaaaggtaatacatactcaaaagtcaggtttgcctgatgcctttactacctttcgaggtaatttctattgattgtatctgctgggtggaaatactatataatggtgtgctactacacatctcctcccaactctgcagtcagtgacatcccattggtagcttgaaattgaccatggcatgagtatttacatcatagaaattggcaaatgctacaaatcagcccctgccccccaacaagtcattaaacactgatatcactggctgcggctcaggtatttacatgatttttttaaagctcctccggttgattctgatgagcagcagagttgagaagcaccagccaggatctgactctttctgcctcttgagcaagcctcatctcttagaaaaactctcctcttccccccaactttcttcagtcctgccacacacaaccaactgcagtggcccaaacacgagtgccatgttatttctcattctgtgtttttactcctagacacactgattcttctgcctggaatgcctgtcacttccttgtctgcctggcaagcacctgttcatcttccaaaactcagctcagtactttgtcctgtgtgagctcttcctatacctcctccccacacaggttcaccactctgcctctgtgacctgtatgtcttctcattaaagggcttttagaattttatggtgctttctgattatgtgtctctatctccacccccattagacactaagcacccgagggcaagggcgtgccctgtttctctgcatcccagcagggagtgcagcaccagcatagtagatgctcagtccgtgtttactggatggataaatgagctaaaccaggtttcctgactcctggggcagccttcttgccaccccagtcctccacctgacccagcctttctaaaggcaggaagagtaaattactgccattcctgtgatggaccacattctgagcttgctgctgctagacgtggtgtgaagatggttctcacagctcttttaacaataagactttttaaactgactttagttattccaggtttagaattctgtccattcattattcattcaataacatgccaacattattccaggcctagagatgcagtggtgtgcaaggcaggggagggcactttcttcagagcactttcagttaggaggtgactcagatgattaaagaagcaatgactggccgggtgcagtggctcatgcctgtaatctcagcactttaggaggccaaggtgggtgcatcatttgaggtcaggagttcgagaccagcctggccaacttgctgaaatctcggctctactgaaaatacaaaaattagtcaggcgtggtggcaggcgcctgtaatcccagccatccaggaggctgacacaggagaatcgcttgaaaccgggaggcaggggttgcagtgagccgagattgcaccacggcactccagcctgggcgacagatcaagactccatctcaaaaagaaagaaagaaagaaagaaagcaatgactaataagtgaactaagagcgaaagaaagaaagaaagaaagaaagcaatgactaataatgaactaagagctatagcatagaaaatgctaggttccatccagggttagctcctagtctgtggggtttcatgaaggctccccagagtaggtggagccaagggctgacacctgaggcaaagaggaaggtggaaagctgttccctgcaactggaagatcctgtgaaagggctccagggccagagagagctcagcagctgcaaggaacagaaagaagttgccacaaagcctgtgaggagtgacagcagaggggcgagggcaggaggggctttggaagccattttcaggagtctggattctatcctaggagcagtgaaaccccactgaggcataaaaccagggagcccccttaccagatctgtactaagagaacttgcccagatcagtggcccaggagagatgaaactagagagcaggagaccaagccttgagtagggaagaggctgctgcaatggatagaagggaggggtttcagaagcagaatcatgtctcacttatatgtggaatctaaagaaatgaaactcatagaagcagagagtagaaaggtagttgccaggggctggggggctggggaaaatggatttgggtcaaagtatacagagtttctgttgtaaaatgagtaagttctagaaaacaaatgtgcagcatggtaactataattaataaaaatatacacttgaaatttgctcaggaagtaggtcttatgtgttcccaccacatacacacacaatttgctatgtgtggtgggcacatgtaagactatggtgactatgaggtgatggattagttgatcaccttggttgtggtaagcacttcatagtgtataccaatgtcaatcttacatctcaataatatgcagttgttatttgtcaattataccttaataaagctggggaaaaataagagcagaatcatggaacatcatgactggatttgatgatggaggtgagggaagtatgaagaatctgagagaggtagggagagctgatcagttcatggttcatgttgggtttgtggagtttgcagtgcctatgacgtatccaagtgtagttgatcagttcatggtccatgttgggtttgtggagttggcagtgtctgtgacatgtctaagtgcagttgatcagttcgtggttcatctttgggtttgtggagttgacagtgcctatgacatatccaagtgcagttgaccagttcatggttcatctttgggcttgtggagttggcagtgtctgtggcacatccaagtgcagttgatcagttcatggtccatgttgggtttgtggagttggcagtgtctatgacatatccgagtgcagttgtctaggagtcacttagaaattcagttctggaaatttgaggagagatgtgggagagaaatgtagattggggtcatcagtgtatgataactgaaactataggagcaagggtcattcattgtctaggaagaatgactagggtaggaggagaataggacatcacatttaatcaatgaccagcgtagacagagctagtagcagcaatgagatgagtgactagagaggtagagagaaaaccaggaaagtgtggagtcatggaagctaaggaagatggtgttgggaatagaggtggtgaacagagtcccctgttcttgctgataggagaggtcaaatgagataaggacagaggcgtggcctttggattccgagatgtgttgatcaccggtgcacttggcaagcatgccagaggagtgctgaggcagaggtcagagcacactgtgccaagcagtgggaggcaagtgatggagacaagcgtctgaactctaggacactgtgctgggaaggagaggggtgaaagaggacagttttgggatcaagggatatcttctatttttgttgtcatttgttttgaagtaggagaggcaagctggctaaactttaagtaaaagggaagattgtgatcctgtcctctgtgagtgaaagagagcatccttttaatgtgatcagtgccagatgtcatcttacaagccctgtgtctaacctgataggcatttagagtggccaaggcttcctggactggcctcatttcattgatgactgcttttgcagagactccattgcctcctaattgtctacacttggggcctccatttttctcttccttggcagaattttagaagaagcctcctgtcaccagcctttcggagtccccactgatactggtgtgtgtgctcctgctgtggtgctgcccacccaccctcgttcttccaaccctccggcaccgaatccctcctttcactccctctgtcccctgggcaagttccagctggttacagtgaattcccgtatttccctcctctcttacttctcatttgtcagagtgcacaggaggctgcctggaatgccctctactcccaggctgaggaaattaaagtagctaaatttttattatagcatctctcaagaatatttctagaaatcatagagtcgttgcaccttactactgaatagaagttgaggggttatttgacccattccctttaattctaggcagcttgatttccaaactctttgtaggtacgtcttctttaagatttctatataaaaggtcccccaagcccagcccttatgactagggcgaccatgtaattttgcattcaaacagagatgccaaagggggccctgaccaaacaggacttgggaacccaggtatgatctttgggaacaccagaacaacaaccagtgtaaatgaggactgtcctgggctagccaggacatgcagtcatcctgcctgtgatgagtaatgggggacagaacccgagagactcttttttggctagtgcttaacattacgggacagtcactgagcatttactatggattaggcattgttccagacactagaaccgacaacaagatataatccttgccttaaaaaactgttggggaagaaagacacaaataaaatttgccataattctgtgtgataagttttgatttcagttttggtaagtaatagctttatggacgaagtgctttgggaaaaaagcagaagagggatgagtttggaggggttcgagaatcagaggaggtgacaggagagctgggctttgaagatgatcaggatttcttggggaatagggctgcaggagagggaatgtgtgccaagagtgtggaacgaaggcacggtgggtaaaagagagagcaagagctaaagctgagaactggacagggccctgacaggacccattcaccttctggaggcatcattcattctgtgcatttgtgatctctttttgcgtgagtgcaaggtctgaagtggcctgtggcatgctggagcttagtagacacatctggtgaaggtgtggagaaggccagagtaggaaaccactagaagtggagaggtcacctcagagactctccacacagcagtggtggtgtgttgcttctgaaccaaggcagggtcagagaggacagaggaagaggcaaccctaagagagcatttggcagctgagacgataggacgcagtgactgacgtggaaggtgaggaacgcaaaaatgccaagatcacacaagcctgcttcagaagaccaagaagatggggtttcccttcattgagacagggagcaggagagcagctaagtctgacgtcaccaaaggccatttggggcatgtttgggtgtttgtggtgcatccacacggacacgtccattaggagtttgtatctatgggtctggggctcgagggacagattcatgtcagaaatactgactcctcggtgcactgatagaagatgtgattgtagatgagatgactcagagagcaagtgtggagcgagaggacttgggaacccagggttgatttttgggcaacgtctaaccccaaagaaagggcaaccacgaaaggctgttcagaagcagcagtcagcagggtgggagggaaccaagaacaggactgtcagggaagcccggaaggaagcagggtcaagctgggaatgctggatgagcagttttcttgaagttacgggcaggagccatgacagtgggcgggaggcagagaggaggaaacaaggtgtagcctactccttctgagtgcttgaagtggggcaaagacaaggtgtgaagatggagggtgagctggggtttaattgaaagtatttcttttcaggttaatggagttttaaggaagtccctttttacagtgacttctgaaagaacacccactctgtttgccctctagacctgggctatcgaatccactagccactaaccaagtgtggctatttaaatttaaattaattaaaataaataaaatgtaaagttcagttcctcagtggcactggctgtgtatcaggtgctcagctgccacgtggctggtggccaccatgctgcacagcaccggcacagagcgttcccgtgtttgccaggagttccgctggacagccttgttttaaactctgcgtttcaccatcttcctaattctgccttttggaacttagtagagtatataagcccaatctgcttatctagtttccaaacctagttctgaggtgaagaaaaccagatggtatttttatcatataagctgaagaattcttacaattttcaagtcagcattttttccaggcattgaccgataataaattgctccatgttgttaaacataagagagagaaatgtaaacgtgagaattatttctactgagccatctatttagtctttccactgctaccatcataaccacttccatctgatcattagcttttgtgcatctacagtaacttcatttttctatttttttgaaagttatgagctcgttagggaaatttagcaccatagccccttccttccaggaagctgcagaggccctgctatagctttcacctgtctgggcacctaagcagaccttgtcagctgctgggaagaaaaagcatctgatttgccagcccctcgcatgcatccatcagccgggggtgggtttctgagaaaccgttgtgtctgggcccaagctcaaagcacacttttcattcctccctgagctattttccttattattctttagaggggatttgtcatggggtgatttggtgtctccaagatacctgggtttaaaaaggtcctttgcattattctgcatacagcgggacctgaacttgggctggaggaatgttgctgatgcccaggtgggaggcagaggattgtacctgagaacttttcctgtggcctttacctgggggaggagagcatgttggcagaatgttctcagggctggccccatcgcacatggatgtgttcatggatgagttcagcagaagtatggcagctagggagcttttctttatgtccatctgggctttgctatttggctgaaattcctggaccaatccttgtgtccgtaagaaccctgtgtccttaccttgtgtagactgttgactactgttaaccctctagtattagcacagcaaagtactgtcgtgcacttcaagcccctgtacaaacacatgcccctcagccagacctcaccctgggagctgctccggagtcaacagcccttgaaagtgcactgtcctgcctcgtagctggaagctaaggctgcagcttcatctcccatggaaacctgggctcactaggaggggcaaggcctccagaccactgtcttaccatagaagccgcctagcaaactgcaaaccaagcagaaaatgcaggctgggctgaggaggcctctaactgatcaccagccaagcagagaaggggtgagtggcatgtgaatgactgctagctctaggcctggaccatggattcaaaccctgctggctggccctccaccatctcctgctccagtgaagactgtggcatccattagtgaggctagagtacacgcttctgactgtggaatccttctcattttctggctctgccatccactagctgtgtaactttgggcaagtgtggcctgacagccgaaagcttacccccactccttgctagctatatagctgagggcaagccatagaacttctccgagcctctgtttctagtctgcaaaagaggataaaaatacttactgtgcaggttgttgcagagatgaaatgatgtttatcaaatgcctaacacaaaggttctgtagatgctgcttctctattctctctggtttaaatccttggcaggtactcgttttcttactaagaaggttataagatcaaaatttcttattttagggaagtaaaactcaggaaagggtttacatctctgaattaggctgaaaagggacactggggattggtcgtggaggctcactcctgtaattccagcactttgggaggctaaggtgggaggatcatgggaggctaggagttcaagaccagcccgggcaacatagccagatcccatctctacatgtctacaaaaattaatataaaaattacctgtgtcatgggcctgtagtcccagctacaggctaaagcaggaggatctcttgagcctaggaggtcgaggctgcagtgagctatgattgtgccactgcactgcagcctgggcaacagagcaagaccctgtctctaaacaaaaaaaaaaaaaaaaggaaaaggagggacactggagaagaagctccacaattttccaaggtgccagggtgaaccagcacgggccaggcggaggcctgtcgtctgcactcccacatggccctcctcctactcctgatgtggcttctctctggtatggacgcaggagctggtccctggcccacaggagaaacttggacacagccatgataaacgcaggctttataatccaagagcttgaaaagataagagtgactaataaataaaaatttctccatttcttcatgcttgattttcaagggaagatgtagaataaatttgagccaccttcccctgcaagtatacctttaaatattaaatattttacttaattataaaatcccctgctgtctggagagaatggccaccttctctccttagtggaaacgatgtcatcgcatttactgagtttgtgaatgtaaagtgttttcagactgtaaaaccctggatggggttctggaaggcctcctctctgggcccatccaaaggggtcttcagaagtgcattggtgacaagaatggcatcaagtaggaagggccccaggtgtagagggatgggcagtggacacctctgtcaggaagagtcttccttatccagggctatcaggatcaggagctagagcccacgtttggagaaaacacaagaagtagtaccaacccagtgagtctcgggtaagaaattggagtggtttggtttcccatctctaacttggccagatgtaccataagctgtatctgcaaagccagtgtaaggctagacttaagttcaattaggatccaaattcttcactgtcaacttgtctaagtttttgtttatttcacttagtttcctagtgaaattttcatttgaaaattcccagccttatttatttatttatttacttattttaatagagacaggatctcactctgttgcccaggctggagtgtagtagcacagtcatagctcactgcagcctcgacctcccaggctcaaatgatttcctgcctcagcctccagagtagctgggactacaggcaggaagcactgtgcctgcactccagccttcttttcttttctctagctttttttttttttttttttaaatatttgagacagagtcttgctttgttgcccaggctgaagtgcaatgacatgatctcagctcattgcaacctccgccttcttggttgaagagattcccctgcctcagcctcccaagtagctggaaacacaggtgtgcaccaccatgctcagctaattcttgtatttttagtaaagatggggttttgccatgttgaccaggctggtctcgaactcctggcctcatgtgatccatccaccttggcctctcaaagtgaccagccttattttaactgaataaagggaaaggggctttttttttcatgaccctgaagacagagggactcagtgcgcccccagtggccagaggctgtagttacagggaaagcaagtcgggtccctctgagcctctggaagagccaagtggctggctgctggaaccatccaggagaaaccagattttccaggctagagctgtttcctttttccagtctgaggcttcccatgtattcctttcaacgcagcacctctatgtgcatccctgaaccctatgatctgagaaaaggtagccgaacccccgactttctcttttgcattgacattagcacagatctgagccacatgagtagttgctcataccattatctgcctttggttgagaaattagaaggtgctaggcacaaacacacgtcatcttatttaatctttacaagccaggatccggtactagggtccccagtgttcagagggattaatttgtcaagatctcacagtgagtagattccagtctacctcactggagcctggtgcccgtccccatggtctgcactcctggtgttgaacctcagcaggggctgtccctggcctgctgaaacagttcagctgaccaggaagtgtgtgtgcgtggtgtcttttgtacagtctcagcccctgggtctgacactctgatggtcttttagggtgctgggttatttcctggggttctatctgtgccaagttgtgtatctttcagtgacacacatctgttcaagccttctgagttggggagcaacagaaagaggtgaagagagaaagcactctgggaaacatggaaatatttttgcagcctgattgtctctgcatgcaacactagcaaagctgtttctgctccctttcggtgtccgagtcaaggggacgaagaggcctgcccaagaagaagagggatgatttttctctttctgtggttgggggcagaaaggcgatccggctgcccaagtggttcaggtcaggcttaactcggtctgtggcctctggcctggggaatgtgctgagctttgattcagctaagcagtggcttgttgcccaggcctgtggtcctccaaaacaccagctgaggatcccaaaacttagggcccttgtgaacagggtgagttgttgtcaccaggacttgccttgtcaccacctattacattttctggggacccagcagcccctggcctatggccacacagcaggcgcctcttggccaagagctctggcatgaagctaggcctctccaactatttaatgtttcattagcggttttctaaaggcatggggccaagcctggccgagccacaccattcagaagtacgtgaacacttcataaaaccaaactgttgaaggatcccaaacccaggaatctggtcacttggagtccaggctggaggcccagggcaggctgctgcactgtctcagctctttcttggtctggatacttctgggccacacatctgtctctcaaactgtttagcctgttagtagttctaaactaacttctaaatagtttatatttggggttcaccaacctgttttcatatctgatgaaagctttggacttgccccagaaagagacatccatgcacatatgtacaacattgtgcttagaattgcaaggtattcacaagccacactctaaagatcatcagtggatccaagtggagaacccctgtgctaaaccacacttgcttccacacttaaactctggggactgtggagtgttatccatcaagaagagtaaacaggtattgggttttgttttgtttggctttttgcttgtgtcttggattttgaatcgaagtccttgagtggtagaatgggggctagatcattagaatcactccagacttcacaggtaagagtgggagctcagttgagtgacaggcccatcccagacacaaagtcactccagggcaattattcagagcccccaggagctttcacgctctaggagcaagtcaggtaagcagcagcaacacacgtgccgcggaggcggcacctacattcagactctcattgctcttgattgactgggtggccctggaccagtccagagtccacggctctggaaatggtaatcaggcttgtggttgcaggggaatttatgtgtaccaagtgactggcacaaaacagaggcccaatacactcaatgctggcagatgatagacacagtggagcagcaaagctggtgaggatggaaacaccccatcacctgtgagtgggattagagcgtctgcagagggcatcctgctggcttcccaagccatgagccttctgataaatcttactgctctgtcagagcctctgatttaggggtagggaggggcagtcaggagaaagcatagttagctctcgggcagctagctgtggcagacagcgtgctttgtccctcagatgagtcacaacaagcgcccttggcaggcaggaaggactttgaagtgtggtgccccaaagggctggtccaggaggcccctgcctagcccctgggcctgtcactcctgaatctccatcactggcccgagggcaggcccaggcttgaaataaactcaggccaagctggaggcgcaattagaaggaagagagccatttggctttttccaaaaggtaagaaggaggacttctcatttttgtgctttaaatatcaatgcactcttttgatgccattatttgcattttctgagttccactgttcttgggcaaaatccaatagcccagctctgaaggcctcttccacatacgtgcccctcccctggagaatccctcacaccttctttgagctaccaggccaagaaaattgtattgagctttacctcgtgaagtttgcattttaaaagcaagatgtgttttttcatctctaaatataaagttttcacattgaataagcttttccaaactatatgcccttcatctggatactctgtggaagcaaagggcagcatggctgggtggtgctgagtcgggcagagctctggtctgtgcatcgggagactggccactcaccagatgacttctgggagccaccattccttatctgaaagctggacagctgggggcctccataccttacatcctgcccaccttccacagagttgtcatcattgactgagttatgtctagagaagcactttgaaatgcttctccagcattccaggtcagaacagggtggcctaccccacccaaagctgcagaaagagaggggagcgtgggtccaggggagaggatgtgtggggtctaaagatgcccaagacagttcctggtgagacagcccaaaggaggcagcaggctagaaacttgcagaggaacaaggaagctgtgacaccttcttacctggggacctcaggacaggaagaaatcatgaaacattcttactgggaaagccagaggagctttcctagtatttttgttattggtaacagctgtgaggtgccccctcagtgccctggcaactgtcattgtcacagaccccaggaacatggggctttgggtacagtttgaccctctccctgagatggaagatctcccttaacacctccccccggggacttgagacaggggtggctcctttgctcggctgctgcactctaaccctttgtgggaaggggagcatgcaggtgagtgggtgcaggaggcagggcaagtgctcttgggctttggcaggaatgaaccccatacctgcccacaacaatgtctagtggttgcctgtgacctctagagcctcagagggtgtgagttacaaacagtgctcctttagtattttccatccgtggatgactaaatgttaaaccaggtcagtggaggatcagggcgacagccttttaccccctgtcctcttggtgcctgggttcttgtccgggatctaggaagaatcaggtcacacagatgtgaaggatggtgaatgcaaagattttattgagtggtggaaatagctctcagtaggatggggagcttgaaaggggatggagtgggaagataatcttcctctggagttcagccatcctcagccaaattcctgtccaaccatccccggctgaactcctctctgaccatagtctctgatgtccagctgcctcttctcctctcaatgttcagacacctcttctcttctctccttctctgccacgctgctctgctcctctgccagcggagcttggggttttcatgggagcatggtgagccaaaaggcaacatttgggcaggaaaacagggatgtgaagttttcatttagggccatgggtccaggcttgggggtggaacccttgccagggaccccactcttttcttccctgcctcctggccatatcatccccatgggtttactgcatcttattaaagaactactcacaatgacctcagatcattaataactcagcatctgaactctgacttcctgtctcctgctttttggatatattaatgccaatgtgtctgcctgtatgcaccaggggtttgattcccccttgcaaggtttttaggagatttagacagtgagtcttacaacagctgtgcccagtttttaaagatctcgcctcctggaggtgaaagcaaggggggtgtattcctaaaactatatcaccaacagtgtgaagggcctggtactttgcattatctcatttattcctcactacaccaccatggtgtggataatattaaatccattttacacagctaagaactgaggctcgggaaagttaaataacatggatcactggtggaccaggactcaactccagcctgtggagctctagaaaccaggtcattccttcgtgccctattgcctctctctgaatgcaaaggctaaagcagagtgaggaactcagcaatgagtaatggctcattgtgaagtggactccaggtggtgcctacggggcaggggcttatgtgcccataactgactccatctacctaccaagttctcattagggtcaaagcatgcgatcagagtcagaggctgggtttgagaacctgctccttttaccgaataatttcatccccatgctgtacgagcaaacttgactttgctgaccttatctgtagcatgaaaacccacacagggctgctacgaatacagaacgagataatgcaaataacgtgcttagcatggcatcttctctgaacacctcaggttggcttagggtctcccattctgtgcccccacagcactctctgcctcccttgaagcattcttccctcttatttatccatctgcttccaagctacctaatctcaggggccccatctggcctgctcaccactgagtgcacggccctgacagtgcctgacacctgggcagagatgtacacctctaatgctgatctgctgactggtgaccacggaaggaggcacagcagctacagctattgttactgcttccttcctcccccaaatatacttgatgcttcagtggcatctccctcctgccctccccatgccaggcacctccatcctcatcctctgagccttttctcccaagtccccttctcccaagtccccttctccccactgccctcagaccccctccccatctcggcctagaagccccccaaggcttggtcctcccttcagtctctcccagctcctgcccacagccttctcagaataactggatggctcttagtgacacctcagggtctggaagaggccagaattattctgatactactgcatgtatgtttttgagtctccagtccttgttggtgtgctgggcctctgtggcaggggtgggaacctgtgtcccctgccccctgcccaggcccagtgccaggctgcgcacagaggaggcttcaggatgagtctgttgggcagcagccagggtgcccacagttaagtttcaagggaggacttcagctgcacctttaaagaaaaaaattattatgctcacattcatttcacacccttgtgacaaaggacacatttccacgacctcatctgatcatcatcaaccaacctatgaggtcagcaggtaggacaggtctcccctttgaacagatggggaaacttagtcacagagtataacattatagagctagcagacaggagagcaaccacagatctgggtggggcatccatgatggtcaagaacaaacccgagagccagactggctggtgtgattcccagctcttccacttatagctttgtttccttggcaaattacttaacctccctatgcctcagttttcccttctttaaaatggacataatacttagttcataggctcattatgaggaataagtgagttatgatcttcaaagcaagtattaactgattacgtgcctggcagctagtaagcactgaatgttgtaaaataatgcaacctagacatgcatatggagttctttacactatgtcctctccttttgtacacttctgaacacatccacaatgagaaggaagggagtaaagtgtcacctatttttctgttacttaaggaaggctctagatatggcatgagcctctgacaatgggatgaggacctcattctttaaaactttcgttaaacatggtgaatttcctttatacatgaacattgtaggttcatgcctcttggcagagaagatgaatacaagctgaattacagtatctcaataagatggcagtgtttattgcaaatgctgcaacatcctgcttgagaaaactttgatttgtagtctggttctatgactccaccaaagctagacaattatccaagcagcacctgacctttttgactgtttatcttattggctggcagtggtccaggcctttaatattatgcttctcctcttgttcctggagctttgagaaagataatgaaatgagttgagcgccacgtgcaacgtggctggctaggagactctgctggatagtgcaattggaagggacacctccgtgtgcttccaggggcctgggccagacctgactgggagctctagagaacagaagcccaccagctggaagaggcaggcaggaggtggcactgcaggcggtgtgaatgtgaacagcaaagggtttgctgtcccaggcctcactctgccacttgctgctgtgtgaccctaagcaaagcctttaacctctctgagtctcagtagtcctatctgtgaaatgagaattttaatgctggctctgacgacttcacatgtgaaactgacctataaatcttcaagtgcacactgatgttgttgtaatctggagataagcagcaatctactagcaatagccttgcatcgccattcagctttcatcctccgaaccagacttgtaggcccccagtgccagtgggagccctggtggtctggtctcacggtcaacaggaaggtctgctgtgccaccgccaccaccactagaacatcgctcccttcaaggatttattccttaggttatgatttaagccatatcaattataataccttaggaataataggtccattaatttttttcctacctatttgaccctctgctatgagcaaggttatttgctttgttttgcttttgtttttgggtagggatgcgagctgaaagagatagacagatcatgaggatcttcaagttaggggcattagaatagcactgtggggcagggcagagggacttgtgtgtgtaggcagcagcacacagatacggggctaggacgtaggcctggagtgatgagggtcaaccacagtcttcccaacatttcctggaggtcaacctgcttttaacagccttcattcttttccaactagtgtctcgctgccctgccccaaaatcaaggtgaagcagatactactccaggccaaagacacatctcctatgactgaccttctggtcttggccacacagctgactagctgcttgtgtcattggacgagtgacttcccctcttgtgtcaaggtgcgctgcagagggatggcgttggaggcaggagtgagcgcggagctgtgaggacccagggaggagggtttagaagtcaaggaggaagctgcaggcacgtgactcctgcactggcctcacctctcaccagctctgcaaggcccggagctgccatcccaaggctgcttttcctttcctttctttttttaaaattctttaattaaacttttttgattaagtgacagcttttaccactcctggcagctgctgcgagacaagataatttatagatgcattgacactatatgattaggaaagtacagtaaataacagatgagaagatgactcgtgcaacctgcagggcccctcctccatctctccagtccagcccccaccatctcccagtgagccccaggtagacgtctgccacatcactcaggggctgcgtggagcactcggtgcctttcccaccacaagatgacgaagatgtggtgttgacagactgctggtgtccgtggaccacagctctgctctggggccccagggactttctcagagatgcctgtttccacctagaggaaagacttaatgattctcacccttgaaagtgtgtacagaaatcctctagtcagaatgtccttgctgtgtaccagggcacactgtgggctccgtccagccaggcagggcctggactcaggatcccctaggctggtcacctctggttgtgggcgcttcatccatttccctgtggatgccataaaagcactgtccctttctctgtgtgccacactatggaaaaggttgagaatcaccgctagtccactccggggcctgtagcaaggagagtaattgaagtgccccgggaaactcgagccgtgtccttagctcttcagcactgccggagccccatgctcctcaggaatgagcccctggccttttcctcacagtaactaagagcgctcatgggggcagcctagcctgtctttctgggtgaagcacatctcctcctgtcctcttgtctaccctaacattccacgtgttcctttctcagggtaaaggccaccctcttcttaggagccccgcacccaagccaggcattttgcatgggaagcagtgccctgtgtacttacaatcagtattgtctaggcaagattaaatcagtgacattcaaccgtatacaatcctgcatgatcagacgatttgttggaaggcaggattcgagttcctctcagaagctggcttgctgtgcacgcctctcctaacatggactctcctcaagtgcccaggcagaaagcggccagctcccagccagatgcatggggggccctgggttccagaagatcaagtggccaagcacatgaagacaaatagtttgtctcgtcagcttctgggggtcacttgttcacatgggaagaaaccaagcagtggaggttaccatagaaagattacacagccaaagtttgtggctggattttttttgtggcttttctttgtgaagagttaagcatgaaggaccgagggtatccaggaagaagagtagctttgggattatcaggaaggatccacgtacatgtttctgacttcttctcaaattgcctggagcagtgcacaggacatagtagatctttccataaacactgctaaactgcacaaggaacttattctgttaagggagctccctacctctgtttccccacctgacaggcatgctagtttagactccttcgaggataactcggctactccctgtgggatatctggaaagaatacggacgggatatagatacattctactgatccaagtcactttaaattttttaaaaattttaaataattataggttcataggaagtttcaaaggtagcacagaggcagtgcccttcacccagtttcccccaatagtcacaccatatgtacataacgatggcacagtatcaaaaccaggaaactgactttggaacaacgtgcatgtatagttctgtgttgttttatcatatgtaggttcatgtgaccactgccgcagatgcagaacagttccttcgctatggagatcttccccgtgtgcacatttagacacacccacccttcctcctcatcatccctaacccctggcaactacttatttgttctccatctctataattttgtcatttcaagaatgttatataaatggcttttcttgcgtttctgtggattcgttgaacattttttagaactccatttttatctacctctagtgtttttgagtatatctcttcgtgtagctgttttgtggttgctctaagtattacattatatatacataatttatcagtctactggtactacttttttccagcccaaatgaagtgtgtctgtctcacttttatcctcacccatttatgatagaattgccttaggtatttcctccacacacatgagaaatgcatgtgttacgatttttgcttcaactgtcaaaatttagaaaactctagaggagacagaaagtgtattcatttgcccatattcttgctctttctgttcttccttacttcctgataacccaagattccttaaaaaaatcatttcctttctgcttagagaacttccttttgccattcttttagtgtaggtctgttggtgaccaagtctattagttttctttcatctgtgaaaatacctttatttccccttcatttgtgaagaatatttgcactggatatataatttggttgacactttccttcattaggcacttgcaaaatggtatgctacctctttctaatactcctggtttctgatgagaaatatgctgtcatttgaattattttcccccctgggcaaggtgacatttcccttgcactactctcaagatattttctttgactttggttttcaagggtttgactgtgatatatcttggtgtggatttctttgggcttatcctattttggcttcactgagcttcttgaatctgtaggtttatgtcttttgctaagaaattttcagccattatttctttgagtactttttcagccccatcctcctctttctctccttctggaactctgatgacatggatgttagagcatttgttataatcccacaggccacccaactctgctcactttttaaagattattttctctccattccttatattaggtaatttctattattctaccttcaagttcattgattccttccttcgttgtctataatctactattgagcccattcattgagttttgaaatttcatttattgttctttttacttttaaaatgttcatttagccttctttatgtcttccatttttttactgaggctctgtttctttgctgagactttctgcatttccacggtttcaagcctgcttgtaattgcttgttgcagcattttacagtagccacctaaacatttttgtcagataattctaacatctgggttatctcagtgctagtgtcatccaagtgccttttctcattcaagttggtgctttcctgttcttggtatgaggaatgatttccaattggaacctggatgttctgggtattatgcagctccggatgttatctgaagccttcccttacagctgctttcctttgccactgacccagcagggaggagggatgccaccatcttgctattccagtaagggtggaagtcaggttcccactcggcccccatcagcactcagtgaggcagggcctcctcattactgctggcgtggctcaggctcactgccagacctctgctgataccaccctggctggaggcagaggggagcctcgttactgcctcaccgacaccgcagcgagggagaggcctcattaccacatggtgaatgtcctggcgctcccttagacctcctctgacaccacttcggcagggaaaggggggcacacctcattactgcctagttggggtggaagttcagttttctcacatcgtctccaccgacaccatgtgggtactggggagcctcatcatgacccagtgggaaggaacgtccttttgataatagccgtcctgataagtgtgcagtggacatcgtctccaccgacaccatgtgggtactggggagcttcatcatgacccagtgggaaggaacgtccttttgataatagccgtcctgataagtgtgcagtggacatcgtctccaccgacaccatgtgggtactggggagcctcatcatgacccagtgggaaggaacgtccttttgataatagccgtcctgataagtgtgcagtggacatcgtctccaccgacaccatgtgggtactggggagcctcatcatgacccagtgggaaggaacgtccttttgataatagccgtcctgataagtgtgcggtggacatcgtctccactgacaccatgtgggtactggggagcctcatcatgacccagtgggaaggaatgtccttttgataatagccgtcctgataagtgtgcagtggtattgatttgcatttccctaatgactagtgatgtcgagcatcttttcatgtgcatattggccatttgtagatctttagagaaatgtctattcaaatcctttgcttatttttatattaagacagaaaatgttagacaataactattctcctccagccaaacaccacaagaaacactgcggcttcacccactcttcccccagcaaaggccaagtggggaacctcaacgtccatcctcatcaggctgtaacaaggcaccccaactcttttgccggggtggcatcaagacaggtggggaaccaggaatttccaacacacgctacaacatgggtgaaccttgaaaacattatgctaagtaaaataagccagacacaaaagaacaaatattacatggttccacttacgtgaggtacccagactaggcaaattcacagagacaaagagtagaattgtagtttccagggattggagggaagggatcatggggatttattatttattaaatacagagtttcagtttgggaggatgaaaaagctcaggagatgggtggtgataattgcacaacaatgtaaatgtgcttaatgccactgaatgctacacttaaaaatggctaacgcagtaaattttatgttatgtatattttaccacagttttacaaagtctgggtcttgctagacttcccctttcctgggcttttggctaacgagaggaggctctaattggggcttttttttttttttggtctgtaccttttgatgtttctgggttccccaggaatccagagaactctgctatgttattcctcaggtcctggggttcccttctggtctactgcttctctcctcttttagagtctttttatgtttcttttacatataacgtacagggattttggttgcacttagtagggaaagatgtgtctactccatctttctggaagcagaagtctccaggccactttatgtgaagagttttgtccacatttcatttctttttgctcactagtgaagtcttattcatttcaatttagtatataaaacttatagctgaaaaatatatttcattttcatggaaaaggactcctacttctgaaaccttgcattgatatttctagacatttccagggcaccagtcataacatcaagtaagaagcctattgccatcctccgtgacatccccttcctcaatatctcttttgcccaatgttgcaataatactaatcccaggtgtgttgactagtgccactcataatcacattagtttatcctacttatgctgatccttgtcttcttgtcctgttagtgtcttcagctcgtggctctgttccttttacactcttgttagcacatgtgatcatacacacttacattggacttgtccttttgtcctcatgataactgctgactgttaaaacacttcttggatgaagcaccctgatgtagcaccctggtaaaagcaatgggctttgaattgggatgtttgggttccgacctagttttgccactaatcagctgatcgtctccttcccctagatgtttagcctcagacccctcaccactaaagtgacaggtgtagaactagatcatccctagggacccatcctctgggaagtatcttcaggttcaggctagtcagctctgataaagtcaagagcaccgtcagaccaggaggttgagaatggaggtatcaccgtaggtgtgccctccttgatgagtttttgctgatggatatattaaccagcagtggacggtcactacaggtagaatcttcaacgagactcctattttaggtttctcaccataatttcttaatttttgttggcaattgtgcttgaagcaaaaaccaaattagaaatgatgtttgtctgttgttccccttgaagttaggtgccttgattgcgggtcctctttctgtctgccacttcctcgcagtcccccccaaaccccttatagtcctccctgaagctgcagtgttcaccctagcaaggcaagtacctgtgctcccttggtgcctcccatggcacttgtgccaaatgcaagaaagaggagccaacgcagggcccgctgcccagcaggggaggtggaggcaacgcaggtgtgatgtacacagtccctctcaggtcagggaggagagggaagtagggctaggaggaaaatggggcaggagaggaagggagagcacaagggagaactagtggaagggagaggtggatgagcaggacagctcggagagacaggaacgcaaacagaggagaattttcgctcggggtgggaatgaatcatcctcacctgccagccgcgggcctcagcaagctggcagcttcgtcctctcagactgtgggttgcttttagctgtcagccttggatggtgggctcatgcattctgttcccactccaatctgccagagggacagggtccttccccgcagcactgaggcttggccagtcgtgatgcctatggcgaccgcagaatcgacctcaacgagctcgtcgccgggcaccgttttagcagccccaccacccatttttggaaacacaaccctggcctcccattcacagcagaaaagggcacaaggcccttcgtgtcccaccacctcccttctctctggaatcactgtggctctggttgtggaagtttgtcatgagtggaccccagcaaggaattggtgcatgatatagttttcgttttcaaaggaccatgatttccatggattactttgtgcaaaggatgccaaaaccaaatatttaaagtaaatgaggaaaaaatatgcttggagtaaaaagcatctggaccctgtgcatgtgcgtgtgcatgcgtgtgtgtgttccaggagctgactctagctgtgaggatggctcgcctgtgtgtgtgtgtgtgtgcatgcgtgtgtgtgttccaggagctgactctagctgtgaggatggctcgcctgtgtgtgtgtgtgtgcgtgcacgcatgtgtgtgtgtgcatgcgtgtgtgtattccaggagctgactctagttgtcaggatggctcccctgtgtgtgtatatgtgtgtgtgtgcgtgtgcatgtgcgtgtgtgtgtttcaggagctgaccctggctgtgaggatggccttcctatccttcccttctcctggctgccctatccttcccttctcctggctgcctcccattgtgacatggatttttctctcatctttctctccctactccccttgcagcatgagaggcccagtacctgtaagactaccaggctccatcactctccagagaggccagttctgcctcttaggaagggcctagatcagcgcaaatctcaccatcatgatgtccccaactgctccgcccgtgtatgtgttgggtatttccaactgtccccagcaaagcctgcctcctccccacctcctgagccctgtggggtatcaggagcctcaccactcgagcggggaagaaggacagagcagcagcctcagcccacagcagccctgcggtggagagctgcaatgaaggcaggccttatatagacaggaaaagcagggtgactggaagtactcagtcacgggcagagtcagagccctaggacctttagggacaaggcaggtgaaagacctgttagaattagggagtgaggggctggaggtggggggtacactggaatgttacggttctatttttcgctgagtgaaaaccactaacaacaactacagaagccctgctccttctgtgggctaaaatggcactgctggctgtgtgttcagagcagctaagaaccaggaggaacagagcccttgcctctgttcctagtccccgggccctggccttgccggagtcaccggaggcaaccaagagcccctcgttcagaaagcagccatgaggtagcctggccaccctttcaccttttacaccagggagcccagaggtttccagggcttgctgaagggaatccaataagaagaagatttcagatcctcaggtgtgtgcaggggattagcccagcgctgctgtctgtccaccctgaggctcctcccccatcctcaggattgctgggctggaggcagaaagctgcaccatccttctgaagctctgccccaaaggaattgcagatgtctgcttcctttcatttggggagagaagtcggaggcacaggggccatgaaaggggaaggcgtttgacttagatagcctctccctcctggctgtccctctgagctgtcctgtggagccaggaagaggctttctgggccccagagctgtcttcttgctcgagctaggccctggctccccacgcccaagaccccggctccccacgcccaagccccccccatgcccacctgccactccactgcccttagctcgttacccctgtggctgtggaggtccctcaggaaaagcagctccccaggcaggggtcccttccttccctcaccacagccccagccccactgcaggacgcccaggataccacaaaggccccccacaatccctgctggcaaggccgtccttccacagcacacaccggagaggccttctctatgtgcctcgataacctcagacctggcttcttagagaaacgggtcaggcagtgacgtttgtggctttgtactccattaagtgctcttcaggccctccctggatcttttgagatcatggggataaggggcggtgcccagcagacctggctgcttaaaccatggtctccaggagataagagatgcataagctccaggagcccagcagtgagacaggcgcccccgcggccagaggctcacactgtatgctttgctttagggctcgggagaaagcacattgagctgcgagtgagtaagtttgccctatctctgtcattaattcaatttaattcagtcacctccgcttcatagtaagtgctcagtaaatcatctcacttttttttgaaccagagaataaatatattgatcaatatgtaaataaatagatatttaagagatgcctatacaatggatttgctgagttttcaaactattgaaatcaggaggaaggggctatgctggaggaataaacgtgtctgaatgtaggtttgtctcatgttgagtacgtagcagagaacctattctacgggatagaattgtggaataaatgacatgagggcacactgagaaaagactctgaaaagcatgcaactctgtccaagcctaacaattcaaaatgtaagtaaaatttatgatataagtgaattggctgctagaaagatactctcataaaataagctggttcttgggccgacccaatgcttttttgttttcttgagaaggagtctcgctctgtcgcccaggctggagtgcagtggcgtgatctcggctcactgcaacctccgcctcctgggttcaagtgattctcctgcctaaacttcccacgtacctgggactacaggtgtgtaccaccacgcccagctaatttttgtatttttactaaagacgtgtttcaccatgttgaccaggctggtcttgaactcctgacctcaggtgatccacccgcctcagcctcccaaaatggtgggattacaggcgtgagccaccacacccagcctacccaatgctttttgaatgactgcatgaacaaatgaaagcaatttgataaagcgtgaatgactctaccatctatcctatccccataggccccctcccccaacactcttcccctcctcagtttgaattgccatgtgaatttattgctcctgccaaatgaagtcagctgagatggaaatgttaatttattggaccagacatgtgtcaacagagctctgataaaatgcagcgacatgctgttccaaagcccgctatcccgaaacctcctaccatcctgctgcaaaactgctgtgtttgaggtttcacagcccctctggctgggtctggccgccgtcctaccatctcactcaagtcccgccgtccctccataacctcatgtgagacacacgggtccccaaagccaacctgacctttcccacctgcatctttgctcaccatggtccttccacggagaaggccctccactgccatttaggccattggaactcttctgtcctttaaggcccagctcaaatgcctcccgttcctgagctagaggtgagcttcccttcctcttccccaggcacttctttgttagggaacaggagttttcctctcctgctagactataagctccttaaaagctgagaccatctgatgagtttttaaataaccccccacccaaggctgcccccaaaactcaaatcagtgccttgcatagcagggatgcaacattaggcagtgcagagagagtgggattcagagtaagactggcccaagtcctatcccgtctccgttatttgctggccgtgggacccgggataagtggcgtaatctctgagttttagttgccttatctgtaagatggggatgacactagtcacccgtgttccaagtgtcacttgatttactgtctgcacatggcactcactcaggacatagctgcctgtctctgtattctcctcactccactagagcccatcattttcaatatttcttttaaaaggactagcacttaagcaacacaaacttcccattccttttgtggctcagaatttgggaatgggaattttactgagatcatcaaaggtgaagtcgtacataagccatgaggcagacaccagcttcccgtggatggccggattttgattgcctgtgcttagtgggaacagaagggaagggaaggacctgggaggcctggataggaactaagttcagctggtgtctttatgcctgcgtcaggcttcccacctaccagtgtcaaaggaagggcagcgtcctttgagatgtcaacagctattctgagatttttaaaaaatgaaagggttctgtgttccgggtgtcagctgactgcagcctctacctctgattgagtgtcacagggcatacgagctcattaaaggctctgagaagtcctgtagcaaagaaacctttggactttgcttaacccagtgtttcccaagttttttgtaccccttactgaatgtgggcagccctgagctggagatgtcacttctagccagagggcagtcaggtgtctgccggggagaccctggcttcagttggacaggggtgctgggatcacgggctttctttctcccaagaactggcccaaaggccagttcttttcccaggggacccaaaacagggcttaccgcctcctggagtcaggtatgagtcatgcccaccgggctctcttccccaaggcacccgacacggtctgtgtgtgccatgggctcctgttccataggcacgcacaccctcttctgctgggcagatacctctgtggcatgcgagtgtgggacctgaacccaggttctgtcagggtggcgagggggctcacgcagaggatccacttttctgtcttgctcttgtatgttttctcttcctatttgcctttttattctcctttgtatttttaaatgttcctctctagtaatttttgctagtcttttttatctctcaccttgtttcttccactgtgagtaggctcaaccattcgcctgttgtcctatgagccacatccacgcttttctacctacgtttccaaacttgagcctggccggtacactgacttccaagcctcccgtggaggccgcgcagcgcccctgtagtgccccatggcagcaagctggtgacctgagctgtgatcatgaaaaggaaatattcagcttttcttccaagtggaaatactttatgtattttctccaaggccacagaaaatgaaaataaaaaacagtactggcagcaggaataacaccaccgtcccaagaagaagaaatgaaaacagtgacacactctgtggctgccgctctcctctgagttggtcaagcagaggccctggggaggcagaggtcggacagtggtgaccgtcagtggcagttacagccctgtgtgttcggggccttcctgcttgatgtgaccagagctgagcttggcggctctcattgagcagctaatgcaggagtccccgccatggtggcctcgtcccccagcccctctctgtctttgcttctctctttgcctacctttctctcctccaagtgtggtcaacctgccctttccctggccagctcttatcaggcaccccttccccgcatttcccggccacccttctcttatgcgctgggtgactctcagtgctgactgcaggcttctcttcctgctccttcctctccccttccctttctgtcctctcagaggagcccaggtttcaggctttgctgaggtgagggtgtgggggcgggacctcttcacgtgtatcctcaagctggtcccttcttgtcctgcgggtcccagctccagtgcctccttctcagagaggcctctctcagccctggttgttttcctttgacagctcatcgctattttagaaaggtcttatttgttcactcatttaccgtccttcccacctgcgtgcacctccgtgacagcacccttcctttatggctcgctttctctttcttctcttgttccccactctatttcgtgggcctggaaagtatcaggcacattggagatgctctatcggaaaggaaaaggaatgaaagaatggaaggagtggtggaagaaaaggaaggagggaaggaaggagggaggaaaagagaggggaagggaggaagaaaaaagagaaggaaggaaggagtgggggacgattgtaatatttataagttttaacccaatagggtagctgctaccgtctccattttatagaggggaaactaaggcacagtgcttaaggaatttgtcccaggtcaaaccactagtaagtggcagcacctggctccagaaccagtctgtctccagactctgggctcaaccaccacgctctgagcctgcagtaagatgtacaaggcagaagtcctgtgggtgacaattgggactccacccaccatgccagggaacgtctccatcagaagtgggagaagaggagttaatttttacttgacactgactgtggaagtcattatctcagacacaatttcacttcgttttcatcacaaccctctgaaaaggaccctttacaaacgaggactctaagaatcagagaggctaagggactggccagagttcacacaactagcaagaagcagaggccggattcgaacccagctcttctagctccacatccggagtgttcacattcctcatgctacttggcttttcatcacagacagtcctttagatgttagtgactgcctctccctgttgtggaaagtcttgttccgtacacacctctcttaaacatgcttgcagtggatcaagtgtgctgttgcagtcacttctatacaatgtggagcagccagtcctctggcaaggatgtcgctttggtccaatggtgaaatcagacctagctcatgtcatgctgatgtagaaggccttctcctaaaagtggccgtttccatgcgtggggagactccttgtagctagcccatactctgcgatgcgggttgtatctgtggctcccgcccggtgatgtcctgtcatgatcagcttccagcagttgtgacccacttgcagtcattcaccttcacctcatgggcctgcacggtagtggctacagacacccacaacaggttcagtggatctcaactctggctgacagtgcttgtgggtgcttttaaaaacgctaatgcctggggcccttccctggccgctgtttaccttgtctctggggatagggcccaggcagtttgttaaaaattcccaggaggtacgcgccaaggacctctttctggcctgtcggatcaaggggccctgtgcgtgtgctgcagtctgtttggtggcatgtgactggctgcaaggtggtccaggcggatgacaagggagaggtaatgatgctgttaatcagaaacattaatctgtgctaatgtatcatccctcccaggtagcagaacgttctcattcagttaaaaatctcatctccttgaaaaggcccttgagaagtgagtgatgtgaatgctgacagttttggaaaccagagagagattttgggcaggagacttttcactgtgctccaattcccccctgcaggtggctacccctcccgcctgtagcaataaagattgacacaggaatggcaaggggggcctcccagagcagacattcttctagctgcatattcagcaaatacctgtgcggggcctcccaggtacaggtgctgggctcagcagggacttcagtggagaccaaaaccaggtgcagttcctgctgttactgggcttacatcaagcagaggaagttgaccttacttaagtgattctttcccacaggatgagggagccgctccctctctgcttttgggtccctgtctaaccttctgcctcagctcgctcagctgcatagacagataggcagaaccctagcattacggcaggcatctcccaggctggcttctcctgggctgcgggtggcctttgattttggagcctctgctgccccacagtgctccccacctcccacctcttttgcctttggatggggtcttccacatttcagatggctataaatacaacaggtgcaagttcagacgctccaaggagagcaaccactgccattgggttgtgcagtaaggtgtgaatgactaacatcgaatctgtcctgagagtaggttttagtagagagagagaacctggcagagttgcgggcctgacgagggcaggggaagagcctgtaaaacaagccctgcccacagcagactgttgctcagttaggccagagccctgtggaggagatgagtgtttgagtgaggagagagaggaggaggagggcaggaagaggaggaaaaggctcttgtgttatgttccagttatgcaccacaaggactgcatcatcccgggaagggcccaggatccctcctccagcaagtaaaatgagtttcaaagagcacttgggcaatcctgatcagtgggactcacctttgcctgcagggagctgacacccctggacaactggccagtggagcctctagggaggtggggtcctacaacctgacacgagccaggtttagcctcagatgcagcccatgctgacccccagtgggagcatgctgacccccagctccactgcttgtagaggggattgggagctgaggggttctttacctcctggagtcacagagccccttatggtctgttggaagttacagacccctatggaaacatacaaacaaatgtgtacatgcagcactatatgtgattttacattataaaataagcactaggagggagcaaaaggatggggtgttcattttacagattagaaaactgaggccctccggggcataacgccttcctgcaaccctaggcctctctgcctgtattaggccattgttgcgttgctgtagagaaatacctgaggctgggtaatttataagaaaagaggtttcgttggctcacagttctgcaggttgtaaaggaaactcagcaccagcgtcagcttctgatgaggcctcaggaagcttccaatcatggcagaaggtgaagggggagcaggaaatgtcacatggcaagattgggagcaagagagagggagggaggaggtgtcacacacttttaaacaaccagatctcatgagaactccctatcccaaggacagcaccaagacatgagggatccaccgccacggcctgaacacccccaccaggcccacctccagtcctccagtgttggggatgacatttcaacatgagatttgagggacagatatctgaactatagcaccaccatgccagttccctttctttctgtcatcccagatctaccatgaatcatgtgtcacatcaaattagactcgttagggcataagcaggggccccgcagtccagaatgttccaaataaattgagacttgtccatctgtgtgtcctgatttgggggttcaaagaatagtccctctagacaggggcacaaacccttccttcacacacagtaggcccttgaggaatagtggttgcagcaataaagaagagaagagaattctcaagggtgtatgtggcctctccccctaagagattttgactctgcaatccaacctcaaccacacgggagagagggcagccagtgctgaggctggatgggggcttcatacctgtgtcatcatgggtgccggggcccagcctgccctgtgctagggtcacttccacaccatctctgtacccgccaccagtctccaatttggcccacattgcactttcagccttgctctggccctgccaagcttttcgtaatggggtcactttggccatggcctcacccctctggatgtcaggacaacgcagccagacagggtaatcagacttaggcaaaatggtgtgtgtgtgtgtgtgtgtgtgtgtgtgtgtgtgtgtgtgtgtgtagggggagggagcattcaacagggagagaataccagataataaagagctacagagccaacagggacatggagccactcccactaactgaacctccctcctctttccctccatccttggaagttgcgttccagccagctgccactgttaattcatatgagagattggaccagggagatgccaccaggctttcacccccgctgtgatgctgaggctgtgggagggatggtgtggttgactggggccaccttcattagacagagctgccatcctgataaaggaaaggcttcttgtctcagagctgtgtcctcccactggcttttctccctgcatgctgtaactggtcatctcagtcctgaagcaggtatgtgtgttgggccaaggtggaaggagagtgacactgttattaaattaacccagtccctttcattgcatcctccaagtgaagaacaaaagggattttgcatttgcccacagtgtctctctaagcaaggtctctggaacatctgtaggaactcagagacgtttggaatgggccaataaaacatggtgagcatccagcagcagcctggggtgctgggcagagccgggacctgggtaggaatcacagcaggattccagccctggctctgcgccttgcattgctctcacctggcttccatatctggaggaacatacctatttctcacgatcactgtgaagatggaatggggttttgtatttgaagctctgtgtgcagttctggagccccgaatgtccttgggggtgctctgaaaccttagtgcctttatctcttctaatggtaggaaatgcacccttattttagtcagatcctgtgaattaaattttaaaatggccataatagctaagaaggtaaactattagtgactaactaagttgaagtctccatcagtgtcaagaagacagtttcatttgctgttacataaagttttcagattgtttttctcatacttccaacccaaacgtgcagaatatttaaagcttagcaaaaaaaattatagggaacttagaaatatataaaacatgtgatgattgtaattttcttgtgttaactgggtttgcaactattttgctaggataatctgcccaattaacctctcatataacttctgaaacttgtttcatagaacacgtaagggcaaaggaaaagcaagactcagtcaatgtctgaagcaaactggagtcaatgaggcaatgcctgcttagaactttgcacgcttgaagtttcatactgttaattaaatctgcctcaattcttttttgagggacaaatgggattcaccatgggaaagagagttatctgagaggaacatcccagattggagaaggaagaggtcaactcagcccaactagagtagtccaacagtttaattctatctcactacaacataagcgttctgtcaggtgagcctgctaagttcctttcctctcttctcttgggtctgtaagagtatcgcaattctggccggacacagtggctcacacctgtaatcccagcgttttgggaggccgaggtgggtagatcatgaggttaggagatccagaccatcctgtccaatatggtgaaaccctgtctctaccaaaatacaaaaaattagctgggtgtggtggtgtgcacctgtagtcccagctacttgggagtctgtggcaggggaatcgcttgaacctgggaggcagaggttgcagtgagccaagatcatgccactgcactccagcatggtgacagagcaagactctgtctcaacaaaaaaaaaaaagcatcgcaattctctgtctcttgtcatggccatgctaggacatgggcaacctggtagtgaacaaaatacctttctctgttcctccactcagggaaatctactaatacttggttagactttaatttttcaattttgcaatctagaaacagaaaatacccataaatatcccaaaatagaaacaaaatgcggcccattcagtttccaaaaagtaaacaaagtgattcttcctccatgagatgcctgaatacattcatagttggctaattaaactaccatagaaacaattattcaatataggaggagaaagagaggaggaggaaggagcgggagcattagcagacatacatggcttttggctaggaagatagctgttacaggccagtggaatggagggaaaataacccacggagggcagaatcatttctgcagacaagtctatgaaccaagctgagccttcgtccttttttaccaatagagtttcccttctttccccttggtgcctccccagccatctgtaggaagaggatcccaacaagccttccttcaagtcagtttcagagcatttctgccctacaaggacctgggtatatcttggatgccttgggaggctcattgaagtaccataggatggccatgttttccaggtcatctgagataaccccagcataatcacctgtgtcccccacaaaattattaatagttgccctctttagctctctaaagtgcccttgtttgagtgctaactcgtgtggccagtccacataccctgcagggagggtaaagggcaccaccttatgtgtcagcgctgactggcagcagctgctggagtgctgtgttgaggagggttctgcagtcgtgttgtggctcagcaagcaaagccctggcaatgggttaactgcagcggcccgtggggcaagtgagggagaggcagcactccctgccggcacagaacaaacgctggccaggtcagggtgtgggtttcaggccagctctgctcctagcttcctgtcatctgagtgggatcgtttcccttctctgatgttggaccaagatacctgaagttttctttcaattccataattcgaatctcgtcctccatcgaggattagcttggaagggagctccgatgtcatctagcatgatttcccactccctccatctagtgggggattgtgcaagataacatccgagctcccttccaaccctagaatcgtgtgatcctatggtaactttgtgagagggccctctctgctccagagtgaagctgcactttgggacggatgtcagctagtatctagtattctcatggtgcgttttatagttgacagagcacttgcatgtatctgaccacagtcacatgactctggctttattttcatcatcttcattttataggtgaagaaattaaagctaagtaaaggccaagtaaaggggactctgggctcaaactgcctgggttcaagcacttgccgtagctctcacaatatgtgtggtttgggcaagttaatctctcagtgtctcagtaccttcatcggtaggatggggtaatatacttacatcataatgatgtttcgaggattaaatgaaacgattcatgcaagctgcttgggacactggttggaatatagaacacatgtaataaaatgagttgatagagtgagtggtagaggtggtggaggtagcaattaacagcagtggtagtagtatagtagttacacccagcaagtaaatggcataactgggactcttctcagaaactgaccccacagtctgtatgtgaccccagtgaccccagaatttactgcgctgtgtctaccttaggatttatatccacaggtcagaagcagcaggcaaggtaatgagaaaaataaagatgatgtttaaagagatgttttccccatctagccctgagagagtattggctggggagctgaaattctcccctcctcaacctccgataatctggtaaggtcagtggcaggtgcagggtgcttgttatgccattgctgtactatgggctcatggcaggtggctgaatggacaagctcgtgctccctcccgctccccctcccctcctcttgggagagactgcctgcgatgtcagtgtttcttcagtaacccgcgcacattatgtggttccatatggatcagtaaatttcccccaatctctgtattacaaggtctggtgcctcattaatggcgtcttcagcgccacaagctgaggctaacagctctgtgtttttccatcttcagtgggtctgcacacattttcagcaatttgcaggaaagacctcaattagccaaattcctacgtgactcagtgaaggcattcagaatgcactcagctgtccatcctcaggtggagaggggtgatctgagaggtccagagaagaggcagaaagaaaaagcaagcggggagaggaaaagtcaagggggagggagggaaaacggggagaaggtgagagaaaccacagcagatgtggaggagcgtgtgtgaggacatggttattttcacccagcatgagacagattcacttctttcttggatgtttggtgtcttggctaaaaatatgtcaactgaatgttgtctcagggacagggagatggagagcattaggacactttgcagaaagctcaggcctggaacggggctttctttcacatgtgggtagggggtgagtgcttgggctatgctgagagtggggcccagagcatcgacagtgcagaaactcacttctccaagagcttcagcagctccaggacccttctgcctgcctccctctcccaattccattgtgaagtggcaaagtctgttccaggtactgtgtcctgtgggagggtgaggaggaagttgaggaaacctctctcccagagactgagctggcagaggccatgggcatgggcgctgataagggccaggaagcggggagggtcctaacaccatgacaaggccaggtccttgtctgcagtgtcacagggctgtggtcctctattggccaacagtagctcctctgcacctggaggaggacgtggggcccactggactcacctgggcgactgtctgcactgtgggagggaaggagagtccagaggtctggtcagggactgaagcatggcatgaggcagccctggggctaatgcaggccctggctgtcacattccccagggagggataggcccggaatcattgctaggtagcatagaaacctaacacaccaaaagcagagaattgggtaaataaattatagtacagctattcctgctactagaatgctataaggttattggaaatgatattgtagacaaaatttgacagtgtattaaatgtttaaaagctgttgttaagcaaaaatagggaatataaaatgatacgaacagtataatcgcaattttggaaaaatacacacaaaggaagtagattaatcatataagcgaaaatgtcagcaacagtagcttcaaggaagtggaatactgctccttttccttttcctgttttttgggtgggtgtctcagagttttcttaaatttataacatagaatttgttatttggctattagaaaataaaattatcgagattataagaaataattgggacaacagcaagtcacattttgctgacttcttattggccatttgagaaaactgaaccaaaggattaaaccatgagagcagggaaccctggtccttacctttacaatataaccttttgcagccagtctttagaggtgtggctttaaatgcacttacctcatttccagcctgggcttcatgctctcctcatttgcaatgctaagctttttatctattttcccctcaaagctttgtagttcactttaaagactttactgaaggtggaaaagcatgggaagcctggattatccaatcccaatgcctgggacaaatgaaaggtcacaagaatgagaagaaaaagtttccagagggtttttagaaagccccaagagacttgggaagtcaagtaataatttggcaggaggggtcttccttgctttggtttgggtgtgcctctttggatttcgtggtattcttgttgggggaacagatgactatgttcctcatattctcgaaggcatttgtggtgggactgagaaattagcccagtcctcatggaagagaatgagagagtaggatacagctcagagctgggggcagggaacactggtgagaactaacccagcacagttattttcatatacccactgaatttccaaatcttatcaatcaatgagcagtacatacgcccaccctgtgcaaaatactgggttaaaaactggggggtctaaatatgatacatgcctttgccgtgaaggactggcaatctaattgagaaggtaataaacccatctgaagttaatattatcagaaataattgacaacagtgtgtgagagatgccacaaggtgagtagtacatgattaagtgccaagagagtggcatagacagtgagtgctgggtctgtaagaatgggtaaaatctgaggatacatgcagtagatacttcaggtctgggggaaataatacaggtaaattcttacagataggaaagcccaagctgtatttgaaaggcagtagaagggtttaggatgcccatgaaaattgtggtcagaaaggtgatatatcagttagcttgtgctgcgtaacaaactacccggatacttagtggctttaaacaaccaccatttattaacttacatttctgcaggttggtaatctggattggctcagttgagcagttcttctggacctagcagggctccactgatcttggtttggtgttcaagtgtctgctgtcagctggtggtttgctagagataggcagttcatagtggcattggctgatatggctgggatggctgggatgtcctctttccacatggcctctcattctttagcaggctttcttggcttgtttgtgtgatggaagaaaagttctcagtgtgagaggagaagctgcaaggcttcacgtggcctacgcttagctgttgcacattattccaccatattcttttggtcaaagcaagtgacaaagtcagctcagattgaagagatgaggaaatagactctgattctggaaaagaagagctgcaaaatatcgtggccatttttgccatcttccacagatgggttggttggattgggtgccagaccaaagaaccctttagtaggaaggacatagaaaggatgtaatgagctagagagtgggaaggacctgtgcttcccagtgccagtctgccgacctgtgccaatctgcaatgaaggtttatcagcctgcagttagaggagaaaaacaggaagggtgcattgtgtacatgccagggacggggatggggatggtagtggggttttcagctgttctttattctagtattgcttctccttcctttcatgaaatgaaaaggataacaaatgatcattgttatttttaatatattattggcagaataaaaagttggcaaccctgtgtccattcctaacatttcttttgcttttgtactgatcaataaaatcttgactagagcctgggtgtcactggatagcctatgaagatcaagaattcccagaaggaagaaatggctcgctaccgacccacacatcaaggaggccttcccagcagaggtgggatctcagctgggccgagaatggctagcaattgtcaggcatattttattttactttatttttatttttttattttttgagatggagtttcacgcttgtcacccaggctgcagtgtaatggtgtgatctcagctcactgcaacctccgcctcccgggttgaagtgattctcctgcctcagcctcccaagtagctggaattacacacatgtacaccatgcccacctaattttgtatttttagtagagacggagttttaccatgatggccaggctggtcttgaactccttacctcaagtgatctgcccatctcggcctcccaaagtgctgggattacaggcgtgagccaccgcgcctggccatgaggcatattttaaaaagtaaaataccattgattttggaatgtttatactgtattagtggctccttatcagatcaaacactcggcctgtcgctttagagctttcaaactgagaaacactttcaaaggaaagactgtctcttattacttgcttgtaaatggaaaacctgttttaattacacctgaaaactactttcataagattgacttatgtactgtctgttcaaaacttacagaagcaagccccaatttttttcactgacatttgaagccttccctgaagggacccccagcacatccccaccctctgtgccatccctaccctgcaaacccctgctttaaccaggtctaatgggcactgtgcttgaatgggcttgtctcctgctggccttgggtcctcccctgcctttcagctttctcttctgccctctctttggtgggaagttcctacactgccttctccaggaagccctcactcctggatccagccagctgtggtgttggctttgcatgtcactcacctggtatttagttctatttggggggctattaatcctgcctgcctagactgccaccttcctgaggcacagatcttgtcttcccagtccctgagtgccccgtgtgtgtggcatctcaaaggcggggagctttgctcactctgaaaggagccaacacagtaggagccccagactgtggggccaggcatgtatctccctgctacctacttatctgtgctgtgacactcatggtcccactgaacttgcaacccaatgagatgtcctcctggttggctggacatttccttaaagacatgagagaagaaagagagctcattaaagtcagaggtgctctctgcttgccctgggcagtgactttgcagcgggaaaccaagaggctgatgctgatgtttagcctgtgtccaagccttgtcacgctgattctgtgcaaagaggagaagctgggagcatcttaggtgatgtccttgtgttagttacttaaggttgctgtcacaaagtaccatgaacagagtggcttaagacaacaaaaatgtatacttttgtatcctggaggccagaagtctgaaatcaaggagttggcggggccattctctagggagaatctgttccatgcctttcttttcgcttttggtgttgccaacagccttggcattccttggtttgtagatgcattaatcactcagctttgcctcggtggtcacatggcttccctctttgtgtgtgtctgttttcccttcttataaggacatcaacatattggattaggggcccacaaactccaggatgacctcatcttaactaattaaattggcagtgaccctatttccaaataaggtcacatcctgaggtctggaaaagacatgtatttggggaagggaggatgctgttcaacccagtgccagcctggattctgtaacaaactgactgggaaggagtctgcgctctcctcggctaacagagagaattctgggacctaacatctattcagcaggcacacaccaagttgatgtgggggaaaagcactggggttggagtcagaaaacttaggtataagcccagtctccaccgtagtccagtggggtaaaccttgctttccttgtctttcccatggggatgataataccctttcctccctcccagggttcaggttaagaaaatccactcacacaaaagctcttcgtagcctgcaggcagtatgcacatggtggatggtaccatgcttctttttgtccaggagatggctttgtaagttaagttcagaaatttgcaaggggtgcttggagctatttgatagataccagtccctctgctcactcccaagtacttcgtgatattctatgggccaaaacaccagccgtgcccagctccacccatcttaggtgatgaggaagagtagtttccacaagctcatgagttcaggccaattgtggtgaggagtaggagaggaggctgtgcatacaaagaccagagatttgagcagcgccttagtcagttcaggctgctgtaacaaaatactgtaaactggggtatttcctggggacttataaaccacagaaatgtatttcttatggttctggaggttgggaagtccaagatcaaggtgctggcagacttggtgtctggtgagggctcattcgtggatggctgtatttttggtgtgtcctcacatggtggaaggggtgagctagctctcctgggtctctggtataacagtcctaatttcatacatgaggccttctgccctcatgacctaatcacctcccaaaggccccacctcctaataccttgggggttaggatttcaacataggaatttgggggagggaatcacaaacattcggaccataacaagcagtgatcttaactttccacagatctgctgtgctatgtttcattccatgaactggcaggacaggtgttcttatttctaactagaatccagagacactcaatgtgttgcctgaggatctgcaattagttcatggcaaagtgacccagataccttgattcatggtccagtatattcttttaactagttcccaggactgtttacagaaaactgtagacccatccaccctcacacttgccttgagtttgctctccccacctgcccacccctgactcagtctgggaggtggtgggggggtccgagcatgtatgagacccaatgctggcacagagtatgtgctccgtaaacacttcctttcccctttcccctgtaaacccaagcaccctggtctctgttcttcagatgccgcttactggtatactccttcctggcattgtaggatctggatgtggaggtctccttcccccaggtgtataggaggcccttcctttgtgttccctgcagtcctcaacatgaagctgggcccatggagcccaatccccacaggctgatggcattgagcaccctggcctcactctgtttctcctctgttcctgagcctcccacccaggaaacacacccactgctgactccatgtcccagtaccccagccacacatggcttctctgtgggcggcttcaggcaaagcttctgtctctcctcacccgctctgcacttcctgccctgcaggcagagggagctcccttcattgacgggtggccatgggcagggtgatatgtttgagaagcagtgaatcctgtagctgaaaggaaccatggggccacttaggtcagtagttcccaggccctggtgcttttcagaagtggggaccttgttagaagtcaagatccccaggtcctccccaggatcttctgacctagcaggtctggagtgggggccaggaggctgcatttttaaccagtaccccaaaatatctgtaggtagttgtaggagaaccgaagtttgggatccactcatatactccaacgtcttcattatgtggatgagaaaaatcagactcacagaggctgtgtcacctacccaaggtcacccagcttgataatgatgaaactaaaattagaacccaagattcctggcttccaagatgatgctcttactgccacagcttgctccttgcccttgctatgtttccagagggagaaaaaacataagaggcaatatggaatccagtaatccaaatgtgctctgtgctgagaggtcggtagaacatgatagttaagacgccagcctggtaccaggcagaccttggttccaaccctgtaaaatgagaataatgatgatacccacctcccagggttgttgtgagatcatctacataaaacattaaacacaggacctggcatgcagcaagaactaggggtcaagggtttggcctgtatgagagggattcaggcccagttacttcattcccctgatgttatggcaatggaggagtcccccaagcaggtggaggtacagctgccattgcattgctctgcagtaaagagtcttcaatgtagggacctcctgggcactgtgagccctggtgttccaaaccccaagattcccattccctcacctaccacaaaattcatattcatctgggagaaccaactcaaggctcagcccaaccctgccaaggtcaccagaggataaggccgtgaatcacttttcccacaacttcccttttaagggcaggtccccagcttttattgtactctgttttatatcattataattgtgctgatcagcaaggagaacagacccatttttacaagggaaaggagacacccacaaaaaaaagccaaaattatgacagtttaaagcttgcagcaaacactttttaaattagatctgccttcagtatgggtgtcagacagtttcagagcagagcctgatttggaggagaggcgagttagcccttttagggggcatgtggtcggcaaagaggccaggagcagttattgggaatgaaagtcacttacttacaagaaaggaagtggatggagggtgacgttcttcgcattgctggtgccctggtgctcaccatgatgccaggtgggctttcaatgcctggagaggggagatgaccatcctgatcatcagcctcaaagacctacctctgactgacctggggaaagggacttgattttctggggttcagcttctttttctctgggagtctgaccctctcctcccacctgccccactctcttgctaccttggggattagtggccggggctaagggagttggagcaaggccaggcctgggagacacaggtgcaagtccagataatggtgcaatcatctgttctggatgatggatcagaaaaggcataagtgcaatcttctttttaaaaaatggagtgtgtaaataagcatcattaccacattactgatagtatttggttctgtggccttgagcaggtccttccccctctttgtgctatactgtcttcatctgaacaactaaagccctggaccagatgaacttccatatcccttccagctagaatgcttgctgtgcaccacaaagcctgttagtcttctgctgccttccaggtgaaccaccaggaaggaattggagactgaagagggcaaacaaagcagacactgaggctgtgatgaggggaagtcttcctttagagactaaccctgtgccacttaggcagcgacagtccccttccacagcaacccatgccagaggagcctcgctgctggaatgaggttcctgttccacgcgtttgacgtgtgtgctgatgactctgcaccatatggtaagggtgtccaggctgctgctggtgggtattttatttccttgcctgttggttttaaggaggctgtatagatgctgccctgtgcccatctcagcacaggaagcagagctgagcagcagagatgaaaggcatacagaggccaaggaggcatccatcctggtgtagctgatgtgcttggggccacaggtggtcctactcaggggcagtccctcttgtggggccgcagacctggagcagtcttagcctgggtaagcccaggtgcaggagagaggagggaggtttggctaagacaatagaagccctgcagtgccctggacccatgcctgctttgataaatagcccttctctgcctccattcatctatccacccatccattcatccacccattcactcacgcattcattcattcatccattcacccacccatttatccatgtacttctttgctttcttctcactcatgaatgtgaggatacctcatggcatcaagtgctgttggtcatcaaaaggaccttggaggagatgtgctctaactctctgaggctcagtccctccattgcctacagacagcccttccttcttgggaaactccaagtctggaagttctttcttgagacaagatcggcctccgtctcgttcccactgcttagtcctgccgacttccttctcctttccagagccacatggaccaagcctgatcatttcaagggacagccgttgagcccagtgtttctccaagtgtggaatgggcccttcgcatggctggggagacaatttggggcagtacatggacattttaaatagttatttttactgttacccttatcatagcaagcaataatagtggtgatttttaaaaaaagttccctttccagatttttatgtaagaaaaaagtgagttgatttaatgaaaaaatgaggaaaaacgctatgcatacatggacatggcaagggctccaatggtcccgggggatgctgcactggggagtctcacctgcgctcccttcctgcacccgctccctctgttcccctcacttcacactgttctttgattgtggatatcacataactatctgtataggttgtttgtcaagcccacctgtcaggcctgaccccccgtctgtaatccccacatacatctccacggggaggccatcacatctcttcatcatgtcatatctgaagtgagcttctcagacaccctggaattctagaaccactaggggttggggaaagggacatttcttaagtatttcctatttaatgtgttcagttcacatcttccctttagtcctaaaagagtctctgcaacaagatattctctccattttacaaccaaagaaatggagacacaggaaggttaaaccatctgtccaagctgcaatagttgtggaagagctaaaattctaaacttgatttgtctccttccagcgccgtggacgtcccactacactgggatgccttctagctgcatgcacgaaggggagtggggattatccagccaaattcacttttgtggataaagaaactgcggtctggcaagtttgcatggcatgtccaagtcccctggggtcactggccagcccacactttggactctgttttctgtgagcctttcattcttccagccgttctgaatgaagtctgaaggccacgtttgatagtccccgtcaggccgtaacattttctcactctgtcttttctcttcctcttctccctctctttgattcagactgtcattacctccttcctggaccacggcagaggtctccccacttcagtctagttcatctaaagattgcttttcatatttatttcctaaaacatagcttggcacatatcaccctttgatcgtgaaccgtcgtcagcccaagtcaacgtggatgttaggtcccagatacaacatcctgggtagggagtgtagactcttcctgcgatcctggaggctggctggagtttagacctcacctgcctgggcagaggctttcccccaccgtgcagacactccagcaaacaggggctgctgcttgtttcccctgaggatcttgtgtttctcatgtggaggtcaccgaccttgaccaggaccccattgtgcagctcctcccctgccaccttcaggcctcgctgccaccacacatcctgaccaccagccccagcaatcgccttttctccaaatccttaaactgccgattaccagcagggctcatgtggcaggttgcacacacaatctgtgttgtaatttgtccatggcatgtgtccttcctgcccacttgcctggactgtgcaccccaaaggcaggggaagcatctcctgccctttgtaactgcagtcctttgtcccagtgctctcagggtgggccctcggcacaggccgtccgtgttgaggatactaaggtgtcctggtgggtgctgctcatttgaattcacatggtccgggcagggggaagggttgcccgggaagaagggtggcctctgcagcacccctggagttgcaccccgagtgctgggagacaggcagcctgagaggtgaaagcatgttgtcaaccatgacatgctgcaggcactggagggaggccgtggctgggacatcgaccttgatggcattcagtgcccttcaacttctactctggaggactctgtgagcctctagtgcccggcactatacaatgcactgtggatagcacaggaaaatctgccctcagagtgctcctgctcctgaagcaggagcgaggtcttgcacgcttgctgaatgggacagcctggaaagcaggccgtcgtgccatgtaccaacatcccaaacgagcagtggacagactggccaggaggctgcagaaccacaggaaaaggagaccgagaggctgggcaagccaaagcaccctcccaggggaggagaagtccagctggcctggctgtgagagcttcccaggcaaggggctgcaggggcagtgatggagatgggtggtcagggaggcaacttctccaccggagcagtgagagttgggagaagacaagatatggaggtggggaaggaaggatttaagcagagaagctgggtcctgatgaactactaattgggaatccttataagttcttgagttagggaagtggcatgttcaaagtgagactctggaaagttccttgtcagaaattcactgctcagaaattccttcatcccttgaaggtaggaagaagccaccactaggcggggaaatattgggtctgcatccctgtgtcctccagctgtagatctgaggctgttgaaggggcctcttctccgcctcctcaccccggcctctctaagagctgtaacgttactgcctccctcccacagcctcatcctctgctccatagctctgtgctgtaacaagaggctaagcacagaattacatgggctacccttggctgggggtttgggctgatggctgtagatctagtctgagaccataatttgaactaagcatctcccacacaggctgggagctaacagggaggcagagcagcatttgtcttccagtgtctgcacgctactgccttttccacccaggcaggactaagttgagctttaatatgcccaaatggctgataaggggtggaagcactgggcaccgttgcagagacatcagatgagcccatcaatagagctgctttcagaagcaagtactagaaaactcaactcggaatgactttcacaataaggaaattttatctcacatacaggaagccccaaattaaggtggcactgaagttggttcaactgcttcccccaggacctcagtttttcccaccttttctctttgcccaccctcagcatgttgctcttgtcatcaattagctgtcctcatggtccccagatggctgccacagttccagacttcacatatagacatggatgtttcccattcaacgagagatcatagtgcttttgtgctggtatgcctctctgtctttctgaatcaatgagaaaatttcccttcatgccacactggcagggttgggtctcaggccacttctgaagctaatggatggagaagagaaaaggaataaagtcagctttagctgggttacaccagtggtgggttcatagccagtggtgctcctcataaggtggtgaccaggtctgacaggcagtgggaagaaagtgtgtggtaggggaagagtggggaggcctgtgcagcagccagcacatgactcaaaaatcaggcattcagtgtagccccaacaaagccccaacacacttcccattctgacaattgtgccaggtaaagggggttctgaggtggctgggaggtgagctgatggagtccagctttccctctaatcacaaacaatgggaaaaaaacattaaactcaacattctggctctaccacctactagcagtaaggctttgtggaagattatctaagccctctgatctgtttgctcatctctatattggagatagtttttacccatcatgcagagttactgttaggattagaacagaaatgtccaggctccgactgttgctaatggcagctatggtggaggtgatgatggtggagataggggaggtggaaatggtggtaatggtgatgatgggggaggtggtgttggtggtggcaatgatggtaatggtagaggtagtttggatggtggtaatggggatggtggtaatggtgatagtggagatggtagaggtggtgatggtggtggtggggatggtgatgatggtggtggtggtaatggtggtggtaatgatggtggtgatgatggtggtgatggtggtggtaatggtggtggcggtggtgatgatggtgatagtagaggtagtagagatggtagtggtggtggcagtggagtggtggtggtggtgatggttgggatggtggtgataatgatggtgatgatggtggtggtggtggtaatggtagcggtatgatggtagtggtggtgagggtggtggtggtaatgatggtggtgatgatggtagtgatggtggtaatggtggtggcagtggtgatgatagtgatagtagaggtagtagtagggatggtggtaatggtgatagtggggatggtagtggtggtggtggtggggatggtgggataatgacggcgatggtgatggtggtggtggtggtggttgtgatggtggggatggtgatgataatgatggtgatggtggtggtggtaatgatagtggtaatgatggtggtggtggtggtggtggttgtggtgatggtggggatggtgatgataatgatgatggtggtggtaatgatggtggtggtggtgatggtggtcatggtagtcatggtggtggtggtgatggcggaaggaggtgatgttggaggtggacatggcaggcagatggggattgagaagtccagagcagggtggccactgagctgcatcgtggaggagtaggagttcttggaagtggagaaagtggcagggatgggaagggcatgaagaagaaagctgccggaaacagcctgcctggtttgggtgtggtgagcctttggtgtggctggagcacagaatgtggctggggaacggggagggtcagactgtgacagaccttgaaccatgctaaggaggctagatcccatttaagggcagaagggagccattgaaggctttcgagcagtaaaactccctaggtgtcaatgagcctggttaggaagctcttttaatatccaaacaacccatgatgggggcctgagtggggagaggccatggggtgaggcagaaagacaggatcctgttccctgggccaggtgttggtctaactcctgaaagaaggtgggcagttagtagagagttttaaggccactgctgcactttttccccatttgggaaattacatgctagcccacaggtcactaagcaaatgcccattgtccccaggagtaattcagccctgattggtaatatctgtcaccctctccactccattgcccccaaagaagaggtaatcaccatgagcacagtgagctccttggagagtttggggctgtggccacgctctgacacacagctgcccaatgacagaacaagtagccttatgaggacctgacagccctgggatagaggaggtcagtggagaaggggcttctgccctgggcaggtggctggcctgggtggcatttgggcttcctctcaactccaagagggtgacacaggcagcattgtggcaaaggttgatcatgccctctgtactgttcaaacgctggacaccaggcaaatcaaatgccccatgcctgccctgtaggttgcagttggaaaaacgtgggccataaggaggccactggggtgtgcaaatctaccgcattggcttctcatccccagacctgcctgtgagaggtcagcacaggcacatgtcttggctggggcagtggaagtgaagagcccaagaggcgtgcacagggctagtgtcagacaacgaggcagctttcagcaccctggatctgagcacccacacccacgtgctggggcagggaggcaagtcaggcccacacccatgtgctggggcagggaggaaagcatactcgcaagaaactgataggcaactaagccatttcaacttaacatcctgggcaactacagagaaagagataagtttgagaagggtttttttttttttaattgagctactgtaaaagcaatgaaactagcatactttttaattcacccagcctcaattgctgcttgccctcaataaataggtgcattgttctcttcaaggctgctttgctgttaggctattagtggttttccctgtccttctgctttacaagaatgtcctgagtgtaagcccagaccgttcggagcagcaggcaccttctagcagaggctgctgcagaagacccccggcaggacctgccctcaggattgtgaaatcacagcattgccccacctccctgcccagcccttcttcccagtctaggctcaccctgcgcatctgtccgctggcccactacaaaaggctgtgctgtcaaacatttaagatccaaaagaatgcttctttttttattgtggtaaaatatatataacacaatttaccattctaaccatttttaagtgtgaaattcagtggcattaatcacacccacaatgttgtgcaaccatcaccaccatttccgaagtttttcatctccacaaacaggaactctgtacctgttaagcagtaattcccattgctccttcccccagcccctcgtaacccgtaatctactgtgtgtctctgtgaatttgcctactctagatctttcatgtaagtgggatcatacggtatttgtcctactgtgtctggcttcttttgcttagcacagtgttttcacggctcgtccatgctgtagcatgtgtgggaatgtgtaggcaccacattttgtttatccatttctgtcagtggaaggaaggcttcttcatggctgaatctcaggcataggtggagatcccaggaggaggaggccttcagtgtgggaggcctgctgcccacccctccagccatacctggcaagcaggcttttacctgcccagcagctcctgttgggcacagtaacccaggggtttcagacagtccatggatagagacggccgtgcttcagcagaaggaatgtcagaccagccatggagaaactctcatgcccctcacataggcaagacatgtgtccttgaatcagccccctcacctccatatcccaaggagtttgggatgggtgtcctggtttttctcccagcctcttacattctccaactcatcgatgcgctgagagggcaatgcggcaagtggagcaaagtgctgcaactctcaggaagtatttgtggcgtgctggatgaatacatgggagaagaatgaggtagtgagagctaagaggttgtgcatccttcatctctcagacagagaataggcaggaaatgcatgtagaggtcgggctgatgagtattcaagttctgaaacaacctgagatacagcgtgctgcttgaggtgttattattgtgttgattgtcttttgcaccttgtactgagatggaattgcataactgggcttctcatcaattctgtttggtggagaattcttgctggcttccataagtacatttacataaatctaggtgggcacacacaagctgtcttggtatgagttctcacaccctgggtctgtcacctagtggatgtagccacacagtgttcagcacaggtgggtgagcatcccccagctctactgtgcacatgggagtagacacttcagtcagtctctccagactgtcctggtcccaagagatctaccctggcatggcttctgctcacaaggagtctgtgttcctctaaagcacaaatattaataatctcattaatggagggtgttttgttataaagtctctttgtattcatggtgatcctcagaacaacaaggagaggaagtgaagaagaggagctctttattccgtcccatgtcctaaaatctcactgtgcctttggcagaaatgcacacaaaccagggcctggcggtctccctcgccatagcatcttggagggactttggaagttagctaccgctttggaagtggtattcaaagttccaagaaaaacgaaaaaaacactgatccctcttttcaaatcttatgcagaacctggcacataaagccagtaaaattcttccggactggtcagtaataggtagctgctgctgctttttgtgtgtattctctgtccacactctgtcatattggctccctggaccctcttcaactgtgttaggacccttcgacactcagcatgtgggattatggcattgctctggttcaagaggggatggggagtcaaagcctccttacttagccttcctcttgcctgcacctgtcccgaagccctctgtggaggcctagagctctttgcagcactgtaattttcttacgtccttttgcacatgagaaaatagacccagagaagtagagtgacttgtccaaggatgtgcagccagttggtgccagaatcaaaattattaccatcattcaaagacttctcatcagtaaagactcatcattattattctcattcttgagtctttgtcctcaagaagcttataatgtagttgaaaagagtggtaatatatacgtgagaagataaattggaaaactaggatagcctgtacacatcagtgtctaattagctccacaagtgtttagaagccatcatgattcctggaactggggctctctctccactgacctcttctaaatatttcagacatgagtgtggccatggaccccccagttgccagtaggagatctaagaaatgaacagggagagaaggaagaaagggagaagaagatggaaataggaagcaataaaggaaaaatggaattgaagagaaagtggtagaaaggaagaagacaggagctatctgtgggcaaggtcatcagcctgcctcaaggctggcagggatccacccactgtcagaggagcagggtcctccaggagcaccggggaatcccttccagcctgtattgggccgttgttgcagtgctataaagaactgcctgagactgggtaatgtataagaaaagaggtttaattggctcatggttctgtgggctgtacaggaagcatagtgccatctgcttctggggaggcctcaggaggcttccaatcatggcagaaggcaaagggggagcaggcacatcacatgatgagaacagagcaagagagagaatggagcagggaggtgccacacatttttaaatgatcagatcttacaggaatgcagagagctcacttatctccaaggggatgggctaagcctttcatgagggatccatcctcatcacccaaacacctccaaccctagggattacaattgaacatgagatctaggtgaagttatgctcaaacgatattctgctcttgccttctcccaaatctcatgtcctcatgttgcaaaatacaatcatcccttctccatggtccccccaaagtcttaagtcattcagcattaactcaaaagtccaaagactcatctgaagtagcagggctggagggcccggtaggagcaagatggaaggcaaatcccttccacctatgggcctgtaaaatcaaaagcaagttagttacttacaagatacaatgggaatataggcattgggtaaactttcctgttccaaaagggagaaattggtcaaaagaaaggggtcacagtccccaggcaagttcaaaacccagtagggcagtcattaaagagccagaatgatctgctatgattccgtgtcccacatccagggcacactggtgtgaggggtgggctcccaaggccttgggtatggcccatttgcagctttgaaagtctgggtgtttccatgctattggtctggggttcattctctcttctgcagttgttcgtacctcctctacactatccaaccttaacactgaacagtaggaatgggagtcttcatctgttccacttggcttccaaagcttcccgtttcccaagatcaccaaaagggccagtttgcatgctgaatatttggtgccttctcaatgagctctgtgaccacccaggatttaggagggcacacaggcctctggcttcagagttcaggcatgaagagggccacggaactgtatattcaaggaaccagaggcacgtggggcatctatgagaacagtctttgaccaactttttcttttcttcactccattcatactcgcccttagatgtttctatgacagcacaacgtatgttttgaaggaattaaccaagctgtcttgcttgtttttgttttttgttgttttttttaaagtaattctagaagggcagtcatgcctctaaggtcagagtgaataacactgcttcttgcaacatttagtcagcacacgcacacacacagtgcacacaaatgctacacagtgaccgtgtcccagacgtttcaacaataggcagctgtctttctctggattcctgttcagacccgctcttactggctctctgggcccttccagttctatctcagacccttaaacaatcaggcatgaggattgtgaaaccagccatgtctctggggataagtggtaccagtgaactgcgtttctccagtaccccggcaggtgagatgtgatgaacagacctttggcttgaaggtcagaaagtctggtttcctgtcctctgtgcatttctccctggcttgagtatcttgtcagaatcctaatttttcaggtgaggaggttaattagataacctttaagtttctttctctcccagacttcatgattttaagagaggtcctgtaacttctgctggagataaattcgcataatgtgaagggactttcttggggatgaggtttctgatgggatgcacatgctaatgggggtttgtagtggctgttccgtactgatttggagcccagcctctgcccttttctctttagtctgcacactctcctcgttcagccgtctcctgcaagatgaactctgctctgggccccacctctgtaggtctgatccccaatatctccacttcagcaagttcataactgatgtctctaccttcctccaaaacccctcttcctcttcttgaagtcccctgctgcagtgagaggcatcaccatccacacagtcacccaaattagaaacctcagggagggggcattgcacatctctgcactgcctcttccctcaacccctacgtacaaccagaaaacaaagcacatgctttctcctctcaaatccacctacatctcaccaatcccactatctctactttggctcccgcctccatgatctctgcatgggtcactcccctgcccttaaccctatcactcattctccagccagtgccagattgcagggcgtatctcaccaggtcattcccattctcctcagaatggaatccaagcatccaggcatagccacaaagttcctggtcatcttgctcctgccgggccctccagccctgctacttcaacaccctcactccagccaaatcaaatgtttgcatagcagagctgtccatacttcccatcttcttagttcactctccacctgcaatgcctgaccccctccacattccctactccctacccccagcacctaaccttcttcacctggacaactcttcatccttcgagattcagcttgaagattcttactttgggaagtccatccatagccagctgtgcttgcctccggaatgccatgccatgtcctaattgtattggaatcatctgtccatttgccctgcattgtaccagtacatccttgaggtctgtttctgagactttttcctcaagtctccagcacccaacacttacataaacatgtttgtgaatgcttgagttaatgttggattgaatgatcactgtcaggtgggacaggtccctctgggtctccacatgttctatgccaggatgcaggacaaatgttacatggcatggatcgcaggataggctttttttgggaaaatttgccaaggccaaaggtcaacaagagaagtcacatcccccaacccttccatctcaaaaagagatatgccaggtccaggatgctgctggccctgcagtaaacctgtacccaagtggagggccctcaccacaccccgcgacccatggctctctctttttatagggcaattaagcaagagaaagcagcctgtcaatgaggaaataagcagactgcttggtaccaggcagtctggactaggggtgccagctgcttataggagttgtctgggaatgccagtttcccagcatatagggccctcagagccttcaggatattgctgctctctctgccagagggaggagtggttctgtgcttgagtgctacctcttctggagggctcattatctagacaacccagagggagatacagggtcactttttgacaatgcaactagttgtgccacactgatcatgaatgactaaggggacagatgggtggatggatgggtgggtaagtgggtggatggtgggtgagtggatgagtagatggatgatcagatagaagaatgagtgagtgggtgaacgaatgaatgggtagatggatagatggatggataaatgtataggtaggtaggtggatggatggatggatggatatatgtaggtgggtgggtggatggatggatggatggatggatggatggatgggtaggtgggtggatagatggatagctgaataaatggataggtgggtggatggatggatgggtgagtgggtggatgtatagatgggtggttggatggtgggtgggtatatatatgtatgtatgtgtgtgggtgggtggatggatggatggatggatgggtggatggataggtgggtgggtggatggatgagtgggtggttggatggatagaagaatgggtgagtgggtgggtgggtgggtggactgacggatgggtgcgtcagtgggtggatggatggatggatggacaggtaggtgaatgggtagatgaatggatgagtgggtggtgcataggtgggtgaatggatggatggatgaatgggtgggtggctggctggataggtggtgagtgggtgggtaggtggatagatgaatggatgggtgatgggtagaaagatagatgaatggatgggtgaatgggtggatagatggattgatgggtggatggacaggtgggtgaatggatggatgaatggatgagtagtgagtgggtgggtgggtgaatggatgaatggatgggtgagtgcatgaaaagatggatgaatagatgggtgaatgggtacatggatggatgaatggatgaattggtgggtgggtggatggatggatgggtgggcaggtgatggtgaatggaagtgtgaaagcaactagcacatatgaaagcacctgacacctaatggatacccaacttgtgtgtttccctttcctgtgctttctttcccatctcagcttcacctttctgggaatatagaaagaggtgaccctgtcatctagtggcagacatgaaagctctgaaccatcatgggttggggataaggagatgggctaaggggctgtgtgacagctccactattcccactcccacaaacatcctcaggttcccctgtgctgtgttgtctcatgttttcttcttcaacattgccctgatgtacattttaacccaacatcacctgactttaaaagattggagcttcccacgtcctgtgatttgtttgtggttcacaaccccaaggcagctgcctccctaaaccaattttatggcacaaaaatgggcaggaagggaaggacgaatctgcctctgagatgctgatgaaatctgacccctgcactcctttcccacgccgcggcgtgatctgggccttcatccacacgtgagctggtggttcttccgggtacctcagaaacacctggaaattgtctacgatgcacatttccaagcttcatagccagatgatctgtttcagtaggtctgggtagggcccagaattctacagtttttaattttgcatcctcaaactgcttcacagtgaggctggcactccctacatgcccaggggattgtgatggaatgaatgggagcccagggtactgatatggcctgatggctccctgcagagcttcccatctggccctgctcccgatggccctgccttggaggaaccttccagctggctaggcaggaggaggtgggcctttgtgggcaacatccctcctccagaatgtgggtgagcctggaacaccccctcaccactgctcccacatgcacacaccagagctccctctgactcgcagaggaggggaaaatgggtctaggggttctgagccgagtgcccacttggggctgtggacaggcccgccgcactctggagggcctatgcccgaatgcaatgtggatgggtgtttcgtggctccagtgagggatggctgaggcttctgcagaggcgagcagtggagcatgaaggcatccaggcagcctttgcctggtgggggccattaaggctctgcacttgggatgggggtgtgggagaaagcaattagtggcgagggacgtgcatgaatcagcacagagtcggctggctctaattgagccaacaagtttgtcctgttcgctctgggctcccagggatgggagctgcatccttaaatgcaaagcccttcttcaaggtggcaggggaggaagaagattgtcttctgccccttgaggaaagagaggggctctttccattctccactcccacccagtgcctgcctccatccgcaaagtgctgattttctctgctgaaatgttcgacgtctttggacagaaggttttattttctcaagaaagagatttcacatttctggatcggtgtatgtgagcaggttgcctctgtctgggctgctcttaagggatcttcaccgtctccatttctttgtggctgcatttttgctctgtcttttggaggaactcggctagtaccctccccaagaccaagtctgctgtcttcagggcttgttcctgcagaatcggagcgcggttttccaggagctgtgctttatccccttctcttttggccctgacattgtttccctttagatggagacactatgaattctcttctgggagagcacaataaaatgtcaactgattaactaaataaaatgtttcaaaaaatatgaaatttttccactagtctaatatttacatgttcatgggggaactttgatgcagaaaaaaaaaaatcctgtaatccccagtagcttggtgctgtcgcggtagagcaggtcgtggagttgctaatttggcctgggtgtccccacttggttccaccacagagggggcagcattatcttccacctacttgtgagatctactggttccaaactttccaaatccccaaaccaatgacttatttttctctcttttctatttctgtttcctaggaacgagtggaatatctctttctcataatttttacggtggaagcgtttttaaaagtaatcgcctatggactcctctttcaccccaatgcctacctccgcaacggctggaacctactagattttataattgtggttgtggggtaagtatcactgtctgtttctttccctttatcttaccagtgttgcgggacttttccttaagtcagctgaagacagggtcgttgtcagacggccacaaagatttaggctcgcagatgatctagagtgagaaaaatgagatttattttgctaaaaggaacagaaagggaaagagagactcagcaaagtgagagagtgcgcttcctgcccatgggcttcccgcctcgcaggttgaatccaaggttctacccaggaaaaggaggggtcaggcttctccctgctgcagttggtggcgtgaacttccgtggttccaccctagtgtgcactcctcccagtgcgcaggctggctggagtttctctggggacccctccccacctggctgtctcaccagtacatccctcttcttccttctgtgttatctcttttcaatttggtcctaactatgctgggcttcaggcaagaagaaaggatctgtgaaaatcactttgaattcagacttccccagagggacaggggctatgacccaagagcacccctctccaccactcccacacagcatgcacacacggttggacctgagtgctcctgatggaacccaggctgctctgtgctgctgtaggatatccccctgcttaaggactttcgtttcatctcagaccacatctggccccgcagttcctctgatagtttccctgctgtatcactgagcacatttggggcagctcgtccgtgagcatgcagtctgcaggtgtggggtgagggtggggcgcacacaggctgtgcctgtgctctggacttgtacagaggcctcttccccattctcactctacagggggcctggttctgtggccccagaaaaccagactgctcaagacaggtggatgagaaggaaacagggaactatgaaaggcgaagatgacaggtaaccaaaccccaatcaaatgcagcttcccccagacaccctgctccactgtagcataagataaggtagagtcagtctaggctttcaaaacagcaatgcaaagaatcttaaataaaatgtagaagagatctccttataaataagttattaacctcacaaaaagaatctccataaaatatttgtacctaacaggcctacctacactggtgaagtgtaagttattaaaatgcaggtgaggtcaggcgcggtggctcacacctgtaatcccagcactttgggaggccaaggcgggcggatcacgaggtcaggagatcgagaccatcctggctaacacggtgaaaccccgtctctactaaaaatacaaaaacttagccgggcgaggtggcgggcgcctgtagtcccagctactcgggaggctgaggcaggagaatggcgtgaacccgggaggcggagcttacagtgagccgagatcatgccactgcactccagcctgggcaacagagcgagactccatctcaaaaaaaaaaaaaaaaaaaaaaaaacgcaggtgatgaagttccatcaacacatctgtcttgtaataggagggagcccattgcagcagattttaccttgagaagaagccggttcctttgggctaatcccttgttactctgagcccagtgagtgctcaagtggctgccaccttggactctccctctcttgaagtcctggcagtctgcagagtcaaggtcagaatgtcaggagctctttatcccagaggcctatttttggaggatccttttgtgccatcccggaggagacacagccattgtggacgtctccagagcacccgccgttcaccatcttgtgagagtgcctggtctttactgcaggaaatgacgcaggaggacgtcgagatcatttgcaagttatttccttgtctctggccatctggatggctcataaggttgcttggaaccacgttagggtttttgttgttgttgttgttgccttattttgcctggccaatgaatgacgcactttggccacatgaacctcaggaatatttgggtgatacgaggtgcactaaggttattagcatcattagccaggtctagctctggctcatagcactcggggtgtgcatgcagctataggagagattttgctgcttctgctcatgccagaataaacaaagagtggctaaacgcatgccttgaatgactcagtaaaccatagcaaaagtccttaaggtgggttgttccaaatgcccctaaatcctttttagaatttggcatctttctcaaggcctcagtctcctgggagtcttttgcacatgcatagaaaagagccttgggaatgatgagagcagatgcttctgggaccagtggagggatgagggtgacttgcagggacgaattttgtttaggcaaaattttggaattttgaagtgagttggagttgattatatgtgctttgccccatatgtggtcttaatgaaatcatgagtcgggggagcagagacaagaaatacagggtgagtaggcaccgaacaggagccctgggagggaggggccctgcctgggttgacagggaggcagtgcagtggtgcatctctggcccacacctggtgcctcacctgcggtctgtctggacccgcttcatcccttagactcctccacacaaccacaaggggccaggctttttctggggtcagcccagattccagtcacatctccctagggcctaggccatgaggctggtgaagagagggaggcatccagttgtgtgctcctgtttctaagccacagaggttaagatgccagcagttgcccagctcgtggttggtcttgcactgggacatatttggcacctagtctctcttctcctaagggctcttcatcctgtctaaatcagcccattcttgtaacaatcccccatcgctgcagggtgcagcttaccacctctcttcagctcatctcctttttctgcttcctttgcaatattaaatgggtagccctttgcttccctgtgtctcttggaaaatatctgctatccttggcccctcttctgtagctgtaggggaaggtttctcctggcctcccacaaagctgggggagcctaactcaccctagagaaaggtggacctgcctgcctactgcctgagtgccaggctgagagcctcatctctgcattgctattctggtggcacaagacacgtggcatttctttccttcctaaagcagaggcctcttggtggtgggattgctgaataaacacagagggactgtggcggcctcagatccacgtgcccctaccgagggaccgtggaatcctcagtggatcctcaggaggttccacgccagccagtgaggctttgttgcatccctacctccctagcagggtggaggccctgcctttcccattctctgggcctcacgatcattccacagcctcacggtccttttcttctaaaagctccactgccggactacagatctgccagacacagctcccagagcagtccttcggccaggcgtccacaccagagcccaaccctcagggaccagtgggcaccaagcagtggttttgcctttagaatgtctcattgaggagaaatacaccagccactcctacacccatgtttgaattttctaccctttcagaattaaaagcggatacttaataaagagtctcaacttgaggcaggagttaaaggcaagttgtctaatctccactcccttcaccgaatagtattttgtgaacctcttttactccgatcagcatattactttcctgcaggaaatactgggaacaaaatctggtttgcatttggaatgttgtttgacaaatttgcaaactggtctccatttcctcaggtttcagtgatctaggcttcagtggaaagaacatttcccttgtggagaaagaagcccactcccccatcctggcaacttctgcctgggattcaaggcctcaccagctaacataggaagccatcaagttgccaggctgagagacactgcagatacggcctggacagggttctcaaacttcgttcggctgcagaacccactgttgagagtctcgctcagaggtccaagacacagaccagatagaagggaagctcctctggactagaggagccagaacgccagtcacgcagccagtctgtgcctgggggcctccatggagcgtttctagaccaatcccctcatcgctcagccctgcctggccctgaacttctgctaatgcatctggctaatcccccagctgcagcttcccatttctagatccagatacctggggcataagtcacttaagagctcaagcctattgctcctgaatgaaagctgtcctggttcatagtttagatctgatatggagacccactcctaatacctgggctccctccttgatcccacgcccctctgttgaagaaacacgacccagcgtgtagtgcactctgtggcaatgaatctgtagcatcctctctgggtataaaggacagaaatcaccctgcacgcccttttccctatttttcttggttgccacgaaaagcccaaaattattgagtcatccctcatcacccggactcctgttcccatggggctttgtgcatcctctgatctaatccctcctttctcaccaccccgctgcagaaaccttcccactgtgccctcccatccccatagtccctcgcctgttcagggtcagccaacttttctgtaagggccggatgctggttttcatctttgcaagccatgcagtctctgttccagctactccaccctgcccagcagcaggacaagagtggcatctccatgagtgggtgtaactgaattccaacaaaactttgcaaaacaggtggcccagttctcagcttcctttctggtcacttcctgattctccctgagggtgcagctttctctgctgtctctcagcaggcagccacttcctctcccagaagcctccttccactgcaccaggttgccaggtctaagggggccctgccagctcctgatttctgctccactgcacccccacctccctggagccctccagttttgacatttgtgtcatcagatcctctatgccttacttctctttactgcagccttctgcagacctttgagtcacccctccttgtgccttgaggacaagggctcttggttcgctctacttcactccgacactcacttctccaccttcctgcagtagcttcttggttcttggatatctggcttctggggaacctatctcagtagtcccaatcccatggctatagccaatatccctgtcaccactgattaacacctcccccataatcccaaatctaacatcctaccctctaaccagcaccaccgtctttccggtcccctccctctctcaccctgactcccacgatcccttcgtcccaccgcactcttcatccctgccaccatgtccaccctccttccagccagctcagacgccatgtgccactgctgccctcactcacttgcatttatgctcagcattcttagtcttctgtctgtttatcttgcacacctggaaaaacaccaaccctaatcaagtccaaccagagatctgcttggtacctggaaagggtcaagaaatctgcaaagttgagcagactctcactttacactcatgacctccaacctcaaggaggccctcggtgacacctgagggccctcctgctttgtccgcactccattcacccttctgctttctgagctaattctttcagcacccgtgcctctctcgtcacacttcccgtctccttcccctttcacgttttcagctgatggcctcgttccccagttcccttagaaagatgcaatcagaagaaactttcatgtattcccacaaccacgcgtctatgctgacaatgcgccttctcactgaaccacgacccacggcgctgcccctgcacaggtggacgcccttcgcatgcacccatccccttcttgccagtgaaggagctccgtcccacacggccctgcccctgcacgggtggcaccctttctgtgcacccatccccttcttgccagtgaaggagctccgtccttccagcaatggttccctctcgcttctatgtcatcacattttctgcctctgttagatgattcccatcacatagaaaactgctgtcatatctcccattcagaaacaaaaccctcttgactccacgcccacttctagtaaccccctttttttctctgctcatttagagcaaaatttcccaaaagacttgtctatacggtagccacacgtggccattcagcacttgaaatgtggctaatctgcattgcaataataataattataagtataaaacatacagcatatttcaaagatttagtacaaaacaaggaatgacaaatgtctcatgaatgattttttatatttattacatgttgagatgataatattttggctatgtcgggtgaaataaaatctatgatcactgttaatttcacctgtttttactttttaatgtggctcctagcaaaggtaaattacacatgcagcccacacttgtggcttgcatcagatttctgttggccagggctgtctatcctcacggcctcccactcctcccatgctctcttgaacctatgtctgctgggtgtttgtccacatcactccaccaacacagatgccttcaaggtctggatggtcttggtgttgctaaacccagcggtcggtgtccagccatgtctctgcagcacgtgacaccaccgcctgttcactgaccgctctcttcatggggcgccgttctctccatgtccctgctctgcaagccatccctcatcagtctgttttgttgctttctcctctcttgacccctcaatgtgggagcactgcagggttgagtgctttcacatcctcaccttctgcactggcctcctaggtagtcacatacaatttgactttaaatatgaactatacaactgctgcgcttttgtctccagcttggacctccccactgacctccagacacagtagaaccaactcaagacatgcattcgatgtccaagcaacaactcaaacttcaagaagttctcagcagaacgcttaatgtccattccgccatatctcatcattcctgttgctcatgcccaaactgttggaatcttctctgattcccctctctttctcacacctcacatctagtccatcagccagtcccactaactttatcttaaggtaaatctggtatctaacttttcctcactacctctaacaccaccacttgttctgagccacccagtgtctcgcgcctggatgactgccgcagctggtctctggcctcgcccccgacaggggagtctcccacaacagcagaatgattcttttagacctgtagttagatcatgtcactctcctgctcaaagtcccccaatggcttctgtctcagagaggataccagcacccggtggggttccctatttcctctccgacttcctctcccacagttctcccctttccctgccctgctccagccacactggtcgctgctgttcctctaacgcacaccctgcccctcccttgggcccctggcttacctgcttcctctgcctggaacagtctccagatagtgaagtgggtcccgccctcacttcccataggcctctgctcaagtgtcacctgcagggagttctttgtgcagatttctcaggtgggaaggaaggcggccctcaccctgtctctgcagagcccctccccgctcctcctcctcagcactcatcactctaagctgcagtgtctgtttactgattgctcagtttattgtctgtctccctgctagaatgcaagttccatgaggggaagggctttgtccattttgctatagccccagtgtctggaacagtgcccggcacaccgcaggtgttcttgtttgttggaggagtgaatatgccagctcagacctaaagtggcagggctgaaagccctgtgtctcagttacgtgcacgtgtggttctaccccacttgagaccttcttgtttaaccactcaaccattcattcatttgcgcagcacgcacctcctgagcagccaccaaggccagcacaaaggagatttccatgggccaggaacaagtcaaagagggggggtatctagaaggaaggaggtggggaaacagagcacatggttgctggcacacctgggaggggcgctaggataccatggagaagccggagggctcctcaaggagataaggactggcaacagacttcacctgcttcccacgtttgtccagcgcttgtccagctcctgcctttatgacggcagagggcctgcccctcagctcgctcaggcctccctgggccatggtggcaccctgggcatggccaccacccacactgaggggatgtcagcttacaaccacccacagactccacgcacacccacaacgcccgcccctgggctggagacgcctgcgcaatctgcttttccgggctgtatccagaggtcagagccccagctgggcaaaagaaaacccagtcctgacagtccttctctctttcctctcttctaggctttttagtgcaattttagaacaagcaaccaaagcagatggggcaaacgctctcggagggaaaggggccggatttgatgtgaaggcgctgagggccttccgcgtgctgcgccccctgcggctggtgtccggagtcccaagtaagtgaagcccgttcttgtgtacagtgttatctcctcaccaccttctgctgtcctttgctgaattgccaagaacactctgcaaagggacctgattccatataaatggaggggtttttgtttttgttttaaaatgagttcctttgatctgaagagcccaactcggatgtaagtgccttaaaacacactgtggtcccagcgcctggaaactcctggagaaagttcacagcagtcactcagccacatgaatcctacataaaggaagtggccatctgagccaccctggaggccctgggatggggatttaaatacattttgtagcagaagagccaggtggctaatctccgaggctccagagcactttagccaatgagattatctctactttctgtgtttttccaaagaacaatcaggaaagcatcagtggatgttctaaaagttctgttttgacctttctcccagccctctcctcccttcctgtcaaatggggcagcccaggcctcaggagccctactggaaataccacgcctgtcattgtgagaacttatttttcccaaagagaggaggatattccgctctctgaatcaggggaagggtttggagaggtattgcctatccggatgtcagtcacatggacaatgcctcttctgccacttctccagaagcctggcccattatgggtgcaccccaggtactgaacacagtggcttcaggccccctgggaaggcgcaagcaaaccccagcccaaggtgctcctgggagctcagtccactttagaactcctttctactcttccctcttcagtttgtggtatctgagaacaattctggactcatttgcttaaattttgctttcagttcagctccagtagatttggcccatgactcaagacataggagacccctcagactaggctaggaccagatgagtttggagatggtgtaagggacaggaagacagaggacctccgaatgcacagcctctcctacccatggcatgcactgagcacttggttaccggtgtgctgctgggtggtatcatctggagtcatgaaaccgtggaaatgtgagggactttatattaaccagtttactttttgttcatgcacggaatagtgaaaagatcttcctgtgactttaattaactagcaatagagccaagactagaatcatgtctcctgatttctagaccagctctttcctgccatacagcactgcctcttttaaagaattaagtggtatatctctcttgattgtcttggattctttttctttcttttttttttttttttttttgagacagagtcacactctgtccccaggctggagtacagtggcacaatctcagctcactgcaacctccgcctcccaggttcaagcgattctcctgcctcagcctcctgagtacctgggactacaggtgcttgccaccatgcccagctaatttttgtttttttgtgtgtgtttttttttttttttttttgtatttttagtagagacggtgtttcaccatgttagctaggatggtttcaatctcctgacctcatgatctgcctgccttggcctcccaaagtgctgagattaccggcatgagccactgcgcccggccaattgtcttggatttttacacatatatcctgtctcttaaactacactataagccccttgaaacccagaactgtgccttctattgcctctgattcccacacaacataagcaaagggaacttactgaataagcaaaagaaagagtttgttttctttgcagtgggactccctgggcaaagcttgtggcctgtcttaggctcaaaaggcacgcagagctgagcacacaagcacaattaaagcagactttctctactcggccttaactgtctgggggtacttaggtatagaaactgcatatatcgtggccaggacccacttctttttgaagcctaaattatttgggttttcctggtcaatcagccagaactcaatagccaaaatcaggaagtaggaagggaggatgacagtgactttgaacatgactttaaggagcttgtaatggtaccgccagtgtgtcagtgatagcaactgggagttaattccagatgccagccaaccaagcgaaatggacacaatgaccccgacctgttatctatgtatttattaggggcctgcaatttttattaggggtattaggacgtatcataaagaacaagcatggtcctttcactagagaaatttgacagtctaagaaaagagtataacagtcagcttttgctgtggaaataaaccatctcaaactctgcatggcttacaaccagcaacatttacacctggctcatggcacctgagggtggtggtcagctgcagctcttctgcactcagctggactctgggcttgaccacattctgcgtgccatccaattctggagcccaggtcgaaggagccctcaccttcggtggtaggccttgtggttgtcatggctgggggaggtgctcacaaaatggggcttagagccaaaccgcactagcaacttaaggcttatgcttagatgtggcttctgtcttagctgttcacattccactggccaaagcgagtcacatggccaccctcaaagataatggggccaagaagtgtgctgtacctgcagagaagcatgggtgaacgattgagaacacatagcagcctaccacaaagagactgaggagatgattgttatcaacagctgtagctacagtaattgctctagtacagagattcttaattagagatgaatatggttgagagccactcatgctacagtgcattaaaaggaagaattagattagatcgggtcacttggtttccactacagaggaaatttcccgaggacggagccctgtctccatctgcacttaagtaaggtagacgtgtcttgtagtggtcaggaagcagtaacactcctaggaattctctcaagaggatgcaggcctcaaatgcaaggccctcatgttacctgccgtgcagtccaggaaaatattttcgccattagagatgatgacactgagatggatttgctgttgtgggtgccttgtaggtagctccatgcttatgcataggagcagcaacggtgtctggtttcctttgggtcaccagtaaaatggtggctcttcctcagctcatccagccttctgccctttcttgctggaatagtgtctgtgcagcttttgaaacagggaaccatgcagaccatggtggatcagtgcactgtaccagtgtggttggtgtcatctacaaagatgtcagcagtatctcccctgactacaaacctagacaaatgcctccgtcttctacttctcatagccataggttatctctttctgtatttcagcaaaactcctcaagagttgcctctacctgttgtctgtgattcttgtcctcccattctctcttgaatccactctgatggggctttcttccccactgctgcaccaaaacatctcctgtccagaccatcagtgatcaccgttaccgcacccagtgctctgtcctccagggccatgttacatgatctgttggcagctttggatacagctgatcgctccttgtctttgaaccaccgttgcccttggcccttggcacactgctctttcttagctctgcccttcattcacttgtttcttcttcttggaatcctttgctgacttctgtctcatcttctcaccctcttaacattgggaagctccaggggtagatcctgagacctctcctctgtctgtactcactccctagttatcacgtccagcctcctggtgttaaatataatctatgtatcttccagtaaccagcagctgtgtgtcaccagcccagaccttttttccaaacctcagacttgtatccctacctgccgactccgttcctctcctgtctgaatagataataagtatcttgcacttagcaagactcatggcagaactcacagtcttcccagagtctttctcagcttggtaaatgctagcctcatccttctagcttctcaggccttattggacttatttctttttctcactctttgattacaatccatcagaaaatcctatgagctttaccttccaaacatgtcaagaatttgtctcttaccacctgcacactcagctcagcgctggccgccctcgcctccgtcctggatgatggcgacagcctcctgcaggagtctctgcctcaacccctatcatggcccggacctaacacggcattcaaacggccctctgaacagccaagtcggatcatgttcctgccctgctcaggaccctccacggcttccctgacttgcccagagtgagcgccaaagtcccataggccctgcgatctcacgcctccttcctccctaagctcacccccttcaccctcccctcctctccctcctcaccagccctccacagtgactcccttgctattcctccaacattccaagctcaccccactgtggggtggtggccggcacttgctccttctgtctgaacgccctcggctcagctctctgcacaggcctgcgcacctccttggcccccacctcggctcagctctccatacaggcctgcacacttcctcggcaccccctcggctcagctctcatacaggcctgcgcacctcctcggcccgccccttggctcagctctctgcacaggcctgcgtacctcctcggcccccgctgatgccatcccctcactccccgttcatccacccttccctgctccatttccccacatcacctctcaccatctgccattctgtatgtgtatgtgttcatttgcttatcaccccttacctcatgagaatgtaacctacgtgaggctaacaatttttgttagttgtgttcacagctgtgtcctcagcaccgacaataaaggtgataaatatctgtagaatgagcaaacatggttacacggacgcccatggcggctggcatagcttcacatcacaggccctaagagccaccccacccactaaaatgatgtgagtggtgccagcttcctggacatgtgcctttgctggcttttccaaagggtctttacttcttctgtctcatttgatcttcatgacaattgggtgatattaagaaatgtacataggcaatatatagatatgtagggtttttcttacaacaaataggttcattgggccatttttgacatctgcaattctagaccaatagtgttagaggccccaaaagttgcattttttttttttttttttttgagacggagtcttgctctgtcgcccaggctggagtgcagtggtgtgatctcggctcactgtaagctccgcctcctgggttcacgccattctcctgcttcagcctcccgagtagctgggactataggcacccgccaccacgcccggctaatttttgtatttttagtagagacgggtttcaccggttagccaggatggtctcgatctcctgacctcgtgatctgcccgcctcagcctcccaaagtgctgggattacaggcgtgagccaccgcacccggcctaaaagttgcattttttaaatgcacatatatgtactaaatgtcattgaaatcttatgatcacaggttatggaaatagatgattgcgagggtacaagtccatgagtcatttatcaatttgttcaacaaaatcgactgagtacttactttatgtaagattttgttagccattatagcagatacagaagtgagtcagatgctaagtgtgttctagagagcttgaagtgtagtagaagaaaaaatattcataaaaatgattatataaataaaaattggagctgtcaaaaaggaaagtttaggtaagatgtgcaatgtgatgaattctgtgacaagccatgcattggggacaccatactttggggagtggtgatagagaatcaggagagccttcttggagaaggtagcatttgggatggaacttgaaggatgagtgaggagaggcattccaggaaatcacacaaaggaaggagagtggccgtggccctggagatgcacactgtgaggctgcaaggctaacggcttgattacactgcagaggtgaaaatcagattggctcttccaatggggttctgtgtagttgaaagatttggccatttggcttcatagagactcttctacagtaacagaatcagttctctctgctgtgagcatccactctcccactgcagccgtgctgtggagcatgcgtattacaccaaagactaagccatatggaggaatcaacgttatacagccagatgaaccatagggagagttgtggttaaatatttgcaatgtatatgcaaggagtacatttgcttgtgaagcagtaagcaaggggtcgtttcctgctttccatttcatctcatatgccttctggagaagaactttcaggagggacttgataaagggagaagtcaaatggagatgagaaagatgtgtagggtctttgacgaaaactcagagcaacctagacttgatctgatgatgaaaggaactgaaaaatcacctttctgtaagaccagcactagccttggaagacactcatcatgaatgtttattgagcactctctgtgagccaagcacaaagctaggtgcggggacagaggtagatagtgcactcccatcagtcaaatcagaacacctgtccagttttcataaggaccatccggttttagatctggacctcccagtccagacttgataagagaacatctttctagagcagatagtcaaaatcatgtaacttagtccctgaaactgacatattttggagttcagagaatatctccgaatcagagcagaggctcaagcccacactgcttcactctttatcctttgctttttccactgcctgtgtcctcatcgtcccagacttccctttaatcctggttaatgtgattttgatttagtcctaatggaatgctttaaggacttttcgtgggatacgtttttcctagtatgtgagtctttacaagattagatctttcaggatgtcccttttgtcagtaaaatgttatatctggaagcacacagaatagaaaacagctcgctattaaacggaagtttactttcatcctgagaggtgagaaggagcactgaggaccatgtgtggatagaggtcagaagcttcaatttttccttgctcaggtgaggactgtttcctgaaagcaaatcagcaccagttagtagacaaatatctgtggagtggataccatatagaaggcaaggaaagccttacaacatgctggttttgaacatgagttcttgaatcagactacttactggcttctgccacttactgactctgtacccttagggaagttgctaagcctctctgtgccttagtttcctcctatgtaaaatgggaattgtaatcgaacgtattacatatgctgttggaaagactaaatgagttaaggcacgcaaagcactttaatggtgtcctgcttatagtaagtgctcagttaagtggtagctgttacattatattatattacatatgtagactgaaatagaggacaagatcattctcaagagacaacaaatatactttaaaagataaggaatattcaagagttaaatagcagtttgagaccaaaaatcaccagagaggcatgtgtatgattatttgacttgcatagtgtagatgatgaaatggattcaaggggagagtttaccagggactgtggcagtctgaaaagttttatgaaggaggacataccggagataagccctgaggtttatgtggaacaggcagggatggggatggaaggacatctgagggtgaaaaccttgtttgtttaggtcaccaatgtgggccagtctcggccagcacataggtgtggggtgcccaaacccattaccgaaaaggaagtatgggtcgtgagagccaggagacaaaagtccgcagtgagcagactgagctgggtcttggatggcacaccaagaggcagttttctaaacagccactgctgttcactctccatacaaaacgttcaaaaaaaccgcactgcagagacagctaagtgtcttggaaatctacaaaagaaggtcagaactgaccatgaatcttgaattccagggaggttcacgaacccacccgggctggtggcagagctgaggtcagagccataccgaagctgtcaccgctctctcccaccctgcatgacctccatcccagaggccaggtctgggccatcctgctctgtcctgagcgccctgccagaagatcctatgctgcttgacaccaaacactcttttttaaaacattcttactgatacgatgaatattgacttaaaaattgctgctgcagaagttgaaaactcacctgagtgccaagtccccaggtgaaccacacgcatcccgagatgtagttttcctcccaggatgggttctcccctcctggggattagtcaccgtgaaactggccacactgattagcaagcggtgccagttaatcagacccactgagggcacattagggctgctaaaagcggcttttctgagtgttttcacactttgatggtttaaagccactcatgctgtcctgtctgaaatttgctgttggtaaattgagccacagcagatttgcaatcccatcgtggctcccaggaaagtgttttctggcccagttggtgccgcattgtgcaagagaggaggctaggcagcaggcatggtccctgcaaacagctcctgaacctcgcttgcagttaaggacacctcccagtctggactgataagagaacatctttctggagcagatattcaaaatcctgtaactcagcccctgaaactgacatatcttggagtcccagagaagatcccagagtcagggaagaggctcaaaccacagtgcttcactccccatcccttgctttttccactgcctgtgtcctcatgttcccagacttcctttaattctggttgatgtgatttaacactgaagtacccacaggatgctgctggtgcagctgagcacaagcctgggtaggcagaggacccagcctccagccctgcattcacccggacaagcctggagaccttgggcaggtctgccctccctctggactttgtcctgcatctggggcttgaagggcctggactggctggcctctgcatccccttccctctcccacatgctcatccccaccgcaccaggctgtaccctcactgcttgcagaccttcagcctctccacccctgttctcaccccctctcatgtccttggacttggccctcattctcccctcactttctattttgcttcctcttgctttttatcccctttgtcttataggggtcttacaggccacatacccttaaacaacatgaggggacacttacaaagctacttatgaggacaggggcatgtgcagggggccacccctgaggccgtccctcattctccttcacacagcgctggaggctgcctggtccccctgcccgcccatcggagatggtccctacaacatcttctaagccctttccctcccacttctttcactgccacaggaagtactcaaaccttgtccgctgtatgtgtctcatggcactgttcctgaatccgaatgtctgggtgggaggggactaggctagtacaactgagcttccattctgcagagaggagccctgaggccagagggccacatggcttccttaaggtcacagagtgacctggtggcaggtgggcaggacccttgcttcctgcacggtctgcaaggggactctgatggcaatggtgagggaaccctcagggctgctgatctttgctgcccccaggtctcccagcctccccagaagggaggaagccccaggacccgctccccgccttcccacccaggcagcctggggttgtgctctgcagatggggcagagcaccctggagggcagccagagacagcagggggtggcggggggcccttcacactgcaggaggcttgcctctaagaaacagaatttagaacagggtgggtcccacgcccagccccgccctgccccttagcacctgccaggcccaccctctcccccggtgtctcctgatctcccagtgtggacggtctttccccttgactgctgcatccccagttaagcaactctcttcccggcatcctcccaggtgcccctgaaagacgcctgggccagcagctcaaggcccactcagagtcccgaccctgctgcgacttctctgttgccctgccaggtgctttgcctcggtttctcaatctacaaagagtgagtgatgggggtgccatggataaggaggagattctacctgtgcagccctgtgagctcccagcatccgagacctcttggagagggaccctgtgggttggcaggagccaccgcaccagataggaagggaagaggcccgccatgcggcaaagtgagctgatggacacagtaagcacactcacaggttcccgcctctgctatagtggagtttcactgagaggttactgagtatcaacaacagtatgtggctgaactgggaacatctctattatttagtgttctagatacagcaggtaaaaagtcctcatggcaaagaatgcctgcagtcacacaggaacgtcacatgtgtgctaaggcacacacacattcctccagtcacgaactggtctctttttgatttgagaacaaaatgtaggaggcagtgataaatgttagggttacctccaactacaagcaatattcagcatccgttcaaggccttcagactcaaagagcttgattagctgatgaatcggcccagtggtctagaaacacagggacgttatccctaatttagagataggcaaatccaggctatctagttcagactgttttccagtcgggataactccctccaggacttggtttctgttgtttggaagagaacacagcttcctgagccgaggggaatcacattgcttctgggctgtagggcgccctgcctggctctagagattgagagtagttcatagtttgcctgttgccttatttatgtttcaagagttgtgagccccttgggtggcaggacctgatggcaaatagtattgttgtcacctcaggaattgtgatggggtgggaggcactccggcctgccggtgaggagaccagggatctaagtctggccagctgtgtgaccttgtcatttaacctctgaccctcagcctcctcacctgcaaaatgggagggtacaactgtattcgccctagagtattagcctttagatgcctgccgtgctcacctttcaccatggcagttgccctctgaatcatgcgtaattttcagtcagctgacttcttgagcaccctcttgcatgttagttagtttagttttgttttgttttgttttttaatatttggcttgggaacgtttcagagccaccaaggttgttgccatttctgttgggggtaccccagtagactatgtggtgtatgaccccaaggatatacagaatcacatcgggaggggaaaaacttgttggtatatatatacatatatacaaacattagccaggagaaatggttctgtgcctctcacaaaaagctcacaaaacactgtggtctgtggcagcagcagatgatattgatgatgatagaaaagttctgtcttcactcagacatgccattgatcaagagcatttattcagagactactatctgccaggcatcgagccacgcgacacgagccaccagtccgtttcttcatctatgccgcattgtgttgatactggcaaaggactgaaataggaaatacactcatgtcataggaggtgtcaagctgtttgtcagggcagagaagaggagagtaacgtggcacaagttgtagacatcttccttctgaagacatgggtgattggaacagcatgtcatcaggtgagttttcagtgttgcttccagttctaagctgggataattctgagtattcttaaaatgtactgctgttggaggataatggaaaagcgctgaactcagaaaaagccttgggactgtgagcaccatcaactgcattgaggagacatccaaaagtataatgccttcttcaggctgtttttactagaccatatagtcctactaataaatacttgtgcaaaacagaaatacttttaaaaaaataatatatttattcacttaattttcccagaaataatgccttgatcatatgttttccccagaaattgttagacttaccttctatggtcaacaagagctttcctgaatttcttgagatttagtgaaagcaggtagatgtaaactatattaattacattgcattttccagaaataaaaaaaagcttgaatacccctgaaattcctctgagtattatcatcctgtgctttgttgatagagaatagcagtgacctaataatttcttttttaaccactaattctagacctgaggtgtcatgacagagtatgaccctgggcaaatgccactctttcagctcccaatatagtaagcaatcacacagcccagaggtgggagagtaggtcctaaaataagagcaggtatttattaagcactcatcttgagcccaggactgtggcaggtggtataatcatcacaagagacaagagggcttcttaaactcaggaagctccataatggattcctttttgtgtctggagacctccaaacatgaaatcacagacaaggtgatgactgattaaaaataatggcaataataaaggccacttaggcttataagtgacccaggctttctaaatgttggaaagaaaaatgaggggggaatgaaatgaagatccagtgaggccagcgtcctgtgaagtgatcaatacgcagaacgtgagccccatgtgcctgttattattggttgattctctcgtgctgattcatgacacttagtggttaaagactcagatggtggaatcccactacctaggttcaaattcccagagccaccatttattagctgtgtgcctcgatttcctgatctataaaatgggggctaaaattacacctgcctgcttcctggagttgttgtgaggattaaataagtaaatgcttttaaagcaatagaattgtgtgaaacacacaggaagcactcagcaaatactagctactagtactctgtgggtccaactccctatctgtctacctcaggctccaagttggactgatcagagaaggggaccttctatacttgatcttttttttttttgagaccgagtctcgatctgtctcccaggctgcattgtcaagatctcggctcactgcaaccaccccctcccgggttcaaatgattctcgtgcctcatcttccaagtagctgggattataggcatgtgccaccacgcctggctaatttttgtattttttggaaagacaggatttcaccatgttggccaggcaggtcttgaattcctgacctcaggttatctgctctcctcggccttccaaaatgctaggattacagttgtgagccactgtgcctgacgtacacatcattttaaaaataactttattgaagcgtaatttatattcaataaaattcacatattttaagtgtacacttaagtgtaataaccttaaaatcatagaatttcacttacccaaccccttgtcctgtgtgattactatatgtcttctatttacacatactttataagttccactcaacaatgtttttatttttactttagtcaattgtcttttaagtaaattatgggaaaaaataaaacatagtattttatatttacctacttatttactgtttctgatgcttctactacacattctatagatccaagttcccttctggtatcatttccccttatcttgaagcaacccaatggcatttctataatgtaggtctgctgctggagaattagctaagcttttgtttatctgaacatgtcttttgccatcctcttttgacgaatatttttgctggtatagagttcttgattgacaggtttttttttctttcagaactttaaagatgttccattttctcctggtttccactgtctctgatgagaagtcattgatttttttttttctttctgagacggagtctcgctctgtcgcccagactggagtgcagtggcacaatcttggctcactgtaacctccgcctcctgggttcaagcaattctctgcctcagctcccgagtagctgggattacaggcacctgctaccacacctggctaatttttgtatttttaatagagacggggtttcaccatcttggccaggctggccttgaactcctgacctcgtgatccacctgcctaggcctcccagagtgctgggattacaggcgtgagccaccatgcctggcctgatattattgttattatttccctgcacataatgtttcttcctttgctgactgcttttaaaattttctctctcagttttcagcagtttgactatgatgtgcatcattattatattcattatatttgttctgcttggagttttctgagcttctcagatacactcataaatgagaagttttcaagttcgggacttttggggccatcatttcttcaaatatttttttgtactccattctcactcttctcttgctgggactcctgttatacatggtgtttggccatgttatagtatctcattggtccccggggctttgttcagttttcttcagtcttttattctctgtgttccacagatcagttcatttctgttgattattctttcagttgactcatgtttcctctaatgtctccatcttcattaagcctattcataatttttcatttcagttacttttcaattatggaatttccattctgttcctttttatagttcccatttatttgtggaattctctatatttctccctttaagatcatatactcatttatttcctttaatcagtttttcttccatcctttaaatatatgtatctatatatggatacatatgtagcactctctctatatatatatatctctctacacacccacatatatatagctgttttcaaatcgttgtctgccaagtccaacatctgaacaatctcattttttgtttcctattgactgcttttttccttgactatcacattttatatttctttatatgtctagtgatttctttttaccgaatattagaatcatggataatatgttgttgtgactctggatcttttcatattcctaagagtattggttcatcagcagacagtttaccatgaacgtgtgtaggcttggttttatgcttgttggtgctgagacattgaaagcccaaacccctcaacctccacatttaattttcccctcctgatgttgtcagggcaatgattttggctttgccaggatggatctagagtgggtctcactgtagacaaagggccttactcccaggaggtgcccttgcagtgtcagagtcatctgtccagggtggtaatgagatgttaactaggtctctccacaatttcagggccgtaagtccaacctcctgacactgctttttccccagcactgattaacctgtaccatctcttttctgctgtcaaccctaaaccagctgctatctgatatgcctcattggtttcaccttgtacctgtacaacccagccctaagccacagacacacaggcaacccctacacaaacttctagggccctgtatctacctcgctgtctcttctggatgtcccaccacagccacttcagcttcccacattccaacctgatttctgccttctcaattccatggggctgcagtgttgtgcttgaactgtagctctttgtgctgtcctcgggaaactgttcttaattatagtatattagataatataatgttatatgttatattttactttatatgtcacacatttactgaggacttattgtgtataaggcacagtagtaattggaagaaggaaaggtactagaatcttgctttatttggaaaataacaacttagaaaattttagagccagattgcattttctcatccaatgtccaccttttaaagatgttgaaacctggacccaaaaggtgacatgacttgtcaaggtcacacagttattgatagcagaagaggaaatagcctggcattttcccccactaaatccctccaaaaatatattttaaaagaaaatctaagcatgatgtttagaaatttttaccactatagaaaatttggttagtgccaaagtccctattgatgcaatagtgatttgagccagaattagaaaataagtaagtatgtgaccctaagagcattttgttcgagttacatagaaagattagcttatggcgtagagttaccgtaagttggcagcaatgaacaaatttggttctttgttacactccatctcaagaacatccagggaagagaaagctgttgcctgggtataatggtatttgccagaaaaaaaatcattagagaggtataattaagactagtttagtaactcattcaactagataactctataatgagtacatctcatttaccaccaaaaccatagagatattttgaagttttccccaaaagtataccttttttacatttctaaaggaaggagtgaggatttgcagtgagtgcaaccaagccaccttttcctcctgtttggccttattatcaagtatgttgctcagcaaacagccagtcctcagaaacttcactccaagaggctctgtcaagggtttggcacaaagagaatgtcgcaaagattttccagtgctctagaatatatccttgtattcaaaacccagttgtctggttctgggagtgagtgtggcaggaaaagctacaggtggatcccgtaggtagtttctcccataagaagtacaggccaggccaggcgcagtagctcacgcctataatcccagcactttgggaggccgaggcaggcagatcacttgaggccaggagtttgagaccagcctggccaacatggcgaaaccccgtctctactaaaaatacaaaaacttagccagacatggtggcacacgccggtaatcccagttgctcgggaggctgaggcaagagaatcacttgaacctgggaggcgcaggttgcagtgagctgagatcacgccattgcgctccagcctgggcaacaacagcgaaactccatctcaaaaaaaaaaaaaaaagaaagaaagaaaaagaaaaaaagaaatgcaggccactttttctttcagaattggcagttgagatgattcagatcaactgtcctgccgaggacaattagaaatgctggacaaaatattctaaatcttctttctggagcttggaaaagatgcctgatagaaacaaatgtgaatcctctgtggagaaagataacatcatcaacattttcaaattactttgaaaaccaattgtgtgaaaataaggttttggctgggcgcggtggctcacgcttgtaatcccagcactttggtgggccgaggcaggcggatcacgaggtcaggagatcgagaccatcctggctaacacagtgaaaccccgtctctactaaaaatacaaaaaattagccgggcgcagtagtgggcgcctgtagtcccagctactcgggaggctgaggcaggagaatggcgtgaacccggtaggtggagcttgcagtgagccgagatcacgccactgcactccagcctgggcaacagagtgagactccatctcaaaaaaaaaaagaaaagaaaagaaaagaaggtttcattcatgataccaaataactatatacacaaggagacaaagtaacctgagtgaaaacggggagaaactatagaccatagaaatagacccacagggaattgagatattggaattgtcagatatagacttgaaaataactgtatttaccacattcagagatatcaaagacaggactggtaattttccaaagaaccagatatggaaaagaaccaaatgtaaattttagaaatgaagaatacaatcactgaaatgaaaaaggcagtgaatggatttaaaagaagacttggcacagctgaaaacagttattgaactagagagagggcagggaaaaatactgataatcaaacacagaaactgaaaagaattgggaatgcagagaagagtacagaatatcagggaataagtggatgctcacatttatgaaatgtttttttcctacatctgacagaatcgttatttttaagttaatgtgaattacatattaacttgttatggaagtataatatagtggttatcttggtgtaggaggggtgagtggggctgctgtatagctggtggggttttatttcttggtctgagtaatagttgcatggctgtttgttttgtgataaatcatacattgtaacatccccctttcttgcatcttttgtatgtatatttcacagttttttccaaaaaaagatgtaagaagaagcaaaagtacaggtccaggtagctatatcattggcagatgccgaaggagatctgctccttactctgcctggagcacaaaactacagtttgccaccaatagggaggcagcacagagggacggccatcgtgatgcaatcacttccaatggattagagctgtcatgagagatgcactgttgagaaggattgtgaggccccatctggaccagagggaaggagcagcatctgccatgacgcgggccaacaagtggcacatgtgtgcagtgtagttgtcattttgcctggataatggctaaggaatggaagtggtagcttcaagttggcttggcttctaactccaactctgccatttaccaagtgtgtaatctgggacaatttatctgtcttacctaagcctcatttcttttatctgtattaagacggctggggaattaaatgaaacaatgtatgtaaagcacttatgtggtacccagcaggtgccgagtcctcgggaaatggtagttaatactattattgttgttgtttgctttagatcatcttgtctgcctttcaccatatgcagttttcttctaacacagggtttcttttatatctttttctctgaatttctcttttcaatccacattggtaatataaaaaattaattcaacttgaaggctgatattttaattactcctaaagttttaatttattggggaaccagttacccaccatccctttgctaagacaagaaccctcctttagtgttcctcataccatgtgtgggatgcagaatttattaatctggaaaggctaaattaaaaataaatgaaaatctctaatgaataaggacactctaatgagaacatgcaaaaatcataaaacttgaggctgtaggaaagctatccaggcaatagttctttccccgtttataggaagcttcttttcccagtaagaaaatgcattagtcacttttgaagctcagcttgataaacttactcctttccccaagagagaactatctgccttcctagttctagacctattttcttttgaaagccattaagcctgtgagaccattaaaagtgtctgttacttcatcagccaaatgaaggcagaaaacatgatctgtgagattcatcacgtctccagcttctagccagtgcaacatgattcatggagatcagaagtaagcgtgggctagtagtcacaacctgatgatgacagtggtgattgtcaccaccacaaatgctgaaaggagcactcatttttagaagcagtcaggtatgactttggaagatgaggacccagagttggctagtgagttatagtaagaggatatttatctgatcactatccctgggagggaacttgttggctcacaaaacttagaagccctccaggtggaatacctcctcctggcttaatggaaaggtgatggtggcacatagaaagccactctgtcttatctgcgagtcatcctacagttgcgctaccacatctgctctccacccttccccactctgctctctggctggggagtcgaccagatggcctccatcaacaggctgcctcatctccagtctgtagttgggttcagtcgatggggagccgagcaagagatcagcaggtgggagtagggtgaggtcaggttcttctgtccccagatccttccctgcaggtctgggctggcattgtcacagcctctccgagtggtcctttatacagaatgctgtccttcccactttctgtaaccactctttccacttgcttcttcagcctagtggtgctaatagatcactgttgttgccacttccaggccacccttgtggttctctttaccccatcataaaaagcaccagtcatctcaaattatcttaatttgagtgtgaggagatggtgggacaacctcgtagaaatatctagtaggcttatgaagcatgtcttgaactcagaagagaggacaaagaaaataaatgtaagtacaggtgtggatgcatgtacttagtggtgactattggactcttaggaaggagtgaagtgcatgaattttctgagagagagtttagagagagccacacaaagggcagaagactaacagaataaaagggcagagagaagctccacccatggacacagctcacaggtctagtcttctgggaactgttttcatattttcctaggtgaagatagtctctccctctcctctatgcttccaccgtcctttgggcataattcttaggaatattatcactgaggataacccccatgcaggcaaaactccagtcactgcttgagagcatctgataacaccaaaaagactggatgaggttgctgcagcctcccaggatggccagcgtgccctagggcctggctgctggttggtggggcagcagctgcagtgtcacttgagacccggttagaaatgcaaactcattccccacccatgatggagaattacaatccacattttgacaagatcctaggggacctatgtgctcatttaccctaaagggtcccactgagacctgtgtcacgcttctaagaccacacttcaaataacaatggctgtcactgatatggcctttactatgggcctgatgttgttctgggcactttgcttaaattaacttgtttaatcctcacagcaactttatgggataggtaaacgatcatcctctctttaagatgaggtcaatagttggtacaaggacacatggatgagatgtggtgggattgggattcattggagtcatttggctccaagggtccctcttcttcaaccactgcactctcctccttctcccacctcccatggcaatcagcagggtgcttcataggttctccgtaggtgcttggaagatgcacaagtgaatgatggcatagctgtctgtggtagcctcaagaaagggaaccttgatcatctggggaaaactttctacagcctgggtacgcctgtctctctcattacagaagggagagactctccgatagtattttctcagatagaggatgtagctgaggatggaaaacttcattctagattcccctgtgggagaagctggtgtttgatctacattttcttagaatctgcatcgcaaatccaaggatagtgaggttcaagggcagttatggggctcggtgggcacagtaaggacagtgcccttcacttgaacacctgttttttttaagtttttaaaaattgttttaaattttctttttgttttttagagacagggtcttgttctgtcacccaggctggagtgcagtagtatgatcatagttcactgtaaacttgaactcctgggctcaagtgatctgcccacttctgcctcctgaagtgctgggattacaagcctaaagccactgtgcctggccttgaacacctgtcttaagagaaatctatttctttcagatgacatccaattctaagaggaaggacttgtagcgaagcttagaatttgcccaccatctagtgactctttttgtttggatttggctaaagtttatttggaaatacagaaggcataacttgctttggtagggccagcctctcagtcagccatcattcagctaatcagacatctggattaagcagtatggctttctcttccattctgcaaggacagccagttcaagttaaggagcagctttctaaaactccatgtcctgactcctgccccagtcttgaaagtgggctgtcgccttaatgctggcttgaagcacagcagaatccagagtcagccccactcctgggaagccctgactacatcgggattggggatatcacatgtagaaggggttttcccaggcttgaggttgactcgccatttcttttcatccaggctttccgtattggcagaatctcacatggtgccgcagccctctcttctgttggattgggtcgctgagaagttgtggttaagattgccccagtaaagccagcagagtagaggacccctggcctaatgctgtccttcccctgcccctctgtggcaccagatggggattatttcctccactttaccagcgaggacgttatcaggagggccttcctcgtgtgcttcctgaatttgttttcctgaaagtaaaagtgatatctgcttcctctgatttcacacacaagcaacaaactggttcctcaaacctctttccagggatttctttgagagacagaacaaagccaggaggagcatggggctgacagacggagagccctgggtgtcctatagctatccaggctacgtcgcagtctggaccccacagccctggcgccgggaccctctacctgcacatacctgaccaggtcctctccccattcagccttcagcttaagcaccacttcctggaaagcctttctgcagcctccatgccaaaggaggaccctcgtggtaccctattctgcttctttaaggctcttcacagagtttattatacatcagttgcatgattatttgactaatgtttggctgcctacaagctctgtgagggcaaggcctgcagggcttgtagtcaccaccgtattcccatctctagcacgcaagcatggctcatggcctgtagagcttagctcagtaaatagtctttgagtgaaatgaaggtattgggttaggtgatcccaaagtcctcttcctgtcatggcaaactctgagtccacctatgagaaacttgtacccaccaaccccctaaacccaaacttctcttttcctagttcagtgattctcagcactgtcttctgatgaattctgtcatcaagcctccttgatcgttttcatactttcctaaggcttggctggaatctttgagtttgaataattgggaatgtgaaatgttcatgcctaaacaccaacagaaaagcagagcgtcaatgtggaatccaaacaatggaatctaacgttggcaatgatctccaattctagggtcttcaacagtttctccctgtgccctcccatctcatgtgaaatgactcaaaatatgaattcaaaagagggaagtatgggttgaagattacatgaaaagaatagagtccttaagaggagccttgaatcaggcacattaccttccagccccaggaagttctcattttcctctgctcataaaggcattttcatactcttttgtgatagtatctctggggccctgagcagaacacttcatcccaaaagtagggcttggtgagatgctgttttataaagcaaaagaggatgtgatctgttgtcagccctcgtcagtcatggtggacaatatggaccaggtaatggaagcaccaactttggccaatctgggcatctccaggctaacctcaaaaccaccgtagagaaaggtgccagacattgctttctgcaatggacggcttctcttgactttttaaggagaaacagtgtgatttatagatgcaggtcctctaagcctttcctaaccggaattgtcaagttgcaccccagagggaatgcgggcagcactgtaagaggaagaaaggaaatccatgtctgccggctaaactccatcctccccttttcccgagcccagcactgaatgatgccactgcccaaggccccatctccctggaaggtcttcctggtaccttgagagtctttccacccgccaagaggcagtcacttgacatgaactccaaactagcgagactgaatttctaggttatgtgctgtttgatctttgcatggaaccgtatgttccaaattttccagtagagctctcctgtcacatactcagtcctattggtcccataagtacacatgtgtttgtcagatcttaccctgatgtagggctagaaaaacaggctcatcacatgcgtgggccaatagtgatcttgtgttcacagaacgtttgtcagcagttgcttcaccaggcttgtctagggcccattttctttcaccaacatgagcagccagccctgaagaaggcccgacactcgcttatcagcggtgagcatggcctatctgagaacacttgggtggagaaatgtcgtgtattttccaaattagaacttgagttggaggagctgtttctggggcagctgtgagccaatcccaagaagctgttaaacatccaggccctgagagccaaactctacatggcagggtagagaggaggatgtctggccgcacgccttcacaagccagcctggctctgccaccccaggcaggccgcgaggaaagcagatggaagcgagagcctttcctggaccagccttggaaacatctgggctctcctggaagcagggactccactagactcccccgccttcccagcagatgctgcaagcacgtgtcactgctttatagactcaggtcgtggaggctgagagctgctgtctaagcgtgtggggggcatttgcacagtcgtgaagccatgggctaggagccagaccacctggcactgagccctgtgccaccacttcccagctgtgcgaccctgggtagatcactccactgctctggacccactcttctcatcagaaacatatggttacaaatagtgcctacttcctaggttgttgccgggaggagatggaatgatccaatagagtgctgagggctgctgtcgcccatggcaagtcttcagaacgcgctcatcaagttggagggcctttggtgttccagggcagtccttcacccagtgacagaatccccagtcaggcacttcctcaagtcactgcttggatacctctgaggatggggaatcactacctcttaaagcaccctattccaccttcagataagcctgtttctcggacagataagtgtttatctgtgctgaacctaagtctttcccggacacttcgcagttggtcgtagttccatcctgtggtcagacagaactcatctaacccctcttcctcaaatagcagttgagatcctctgaaaatcactgacgttaccctcctgcctgtgccttttcaccattcctgacaaaacaccttcaatttcttctaatgattattgaatgatgttatttccaattctttcattcttgtggtttctgtcttctgaaggcaccccgtgctcacgcacgtgacttggctccatgtgcatggagtccctccccacgtgcctgagacacaaagataagaagatgtgatgagactcaaggagctctcagcgaggcagggaatggctttccaggcaggggagccgcgtgcgctgggattggaggcacgaagccagagaactgcggggtgtattgctcaagcctagggtaaaaactgggagtcatttgagaccaaactggggaaggaggcaggttagtttacctgcaggtgacagggagtcactgggtgactttcagctacaaagtgacatgttccagtgtgtactttaggaagagcattttaagtgtagcttgaagactgggcaacactggaacccgggagaccagttgacaaaatgacgagcaccaaggggacagagaggaggaaaacgagtcatggatggaaaagctaacagtggctcttctcctgggggcaggacaatgagtcattgcttttttcttcttccctgtgttctgcaatttctctataataagtattttctgttttctctataattagcatgtattatttatacagtaagaaaaatgtattcatgtctaaagatacttttaaaccaaaccagcaggacttggttactgagtggaagaaggagcctaggagatcagttttctggtctgggtgctcaggtgagtggcgtgacccccagcctggacggggatgtgaggaacagggcatttggcaggaattcttatggcatctctgacagctgaaatgacgcccacaagctgctttcactccacttggcctctctccagcctgttcagtggcctctgtcccctgcaggccctgaaactcacctgtcccttagacacctatctggaaagcaggtgtctgtgcagcaatactcaccagcgctccaggacagcagtagcatttatttagatgataagttttgtcactccttcagtaaatatttactgagtgcccacatatgctcagcaccaagccaggccttagcaacaaaatggaaaagaacaggcacagtccctctcacaaaactcagcctaatgtgagagacagatataaatgttttaaaatcccgttaaggaacataacatttcaaactgaggtgcactctccagaggatagaaaatagttccaagaagacataaaggaaacgtttctggtctgggagttgcgtgatgatccctggggaaacagatgcttgggctgagagtgaaggataagtgggagggaagtggggaaaagcattccaggttgagggaacagcatatgtggtggccctgtggtgggaggaacagtagcatattcaactctctaaaagaagagctgttttactggagtgggttggggagaggcagtgggtggagaggtgggtgtagccagacccgacagggccctgtagggcacaggaaggatcttgtcttcatcctaagagcagaggaaggcattcaaagttccagcaggcctgaggcagcctgctgagcagccctccagctgtggcctggaggggagcctcccgatgggtgtccctttatgtcccacacccaccgttctcttgccattggaggcggtggcactgaggcccgtcgagacaccccttcatgcctgggtagcccagatttggggttcccaccacctcgagtagcacttggaagacgtcccccaccccccacccccagcagatgccctgaaagccgctttgcagttcagttttcaactttcttcgcggctctgcatactccaacactaatgtgtatacaacttgctaattaatggaatcatttcaatctgaaaacatcttgttctaatgggaggctgcaagcactcttattaattcacaggtaaaatcattccagcttttctcttctttctttttttttttttatcttcccagcttggcttaatagctgggaagaatcattctaatcagccttgcgagaatcacatcaccagaatgaaaagcaccaacaacggccttggggtttgggaaaggggtgaccagccttagtttacccaggggcaagcgcggtggatgaatgtgagggtgagatgccccacacagaaggtaaagacacaaaaagtgacctgtgtagtgcgacttggaggggggtttcctgtcctgtgtgtcagaggtggcactcagggtgactttctgcaccactggctctgctggagggaaggaggagctgcctccacattctcacctggcatgtgagactcactgcactcacctgggcaggaatctcacacgtgactttctcggggctgggtgtcatctgggggtgacttgctgataaccaccttcctgtcatttgcaaatgatttgcagtgtccctttaaatgaatgccatccccagtgtgttatttctggtataaccgagcttagtaaggggggccttctccccatagaccgcggtgcaagccccagacctcaccgacaacacccatgtccccaggcgggcttttcctttactcttttttaccagagggatctgggtgctttttagagtttcttttcttgtggtaataagaacataacaaaattgatcatttcaatgattttcaagtgtacattcagtggcactaagtatcttcacactgttgtacaactgtcatcaccatccagctctgggactttttccaatcccaccatgggaaaaacctcgaggataaatgagtccctgcagggccgtcttgagtccacatgagctctcactgtcctgagatgctgctctaggagaaaaagatgctcagttgtctgtaagatggggtattacacaatttgacagttatggatggaaacaacatgttcttccccttggaagtacagcagctgccagtcctttgctttggatgagtctccaagacagatttggagtgaggccaacctggatttagacccctgcaccatcagtccttggcgtgtggctctgagcctcagtcttctcatctaaacaacagggctggcagttccttccttgcagagttgctggaagattgcatgagatggcgtcagcacggtaccgcggtgatgcttggttcagtgagtggctctgtccccgcaggtctccaggtggtcctgaattccatcatcaaggccatggtccccctgctgcacatcgccctgcttgtgctgtttgtcatcatcatctacgccatcatcggcttggagctcttcatggggaagatgcacaagacctgctacaaccaggagggcatagcaggtaagaggggcaggcggctgcgctcccaaggccctgccctctatcgctcccagcacctttcccgctgctggctacaccaacatgaccagcagagcccagggaaggccccattcattcagacacacactgggcatggttaagtgagaggcagagacccgtatcctttttttctcagttccaatttttgttttaatctctgttaaaccggcctaacgcaaacttcgttcagcacttttcaataagctacacaatttgagaaacatttgaataacttagaacctatcttttgtcaatctacgacttttcaagccaaccctgagtattttaagaatcagagctgacctggggtcgtcagtctctgctccttccatgcttcagtgtggttggccattgggagccctttcacggggccgcttagccctgagcaacaggttctcccagcaccactctaagatttttctaccttcatggtgctgattccagatcctctgtaattattgtttctgcttctccattcacaggcagatgccccagagcccctattccaggtgggggaggagggcaggtgggaatcacccccttgccggcagccaaacttcctcccttcaaggagaaggcttagttctaccccatgactcccagtcccttcctttttgagccttcccacttcacgttccttccataaatcaatatatttaacagcaatgctggctcattaggcgcttccctgcgtggcactggagttttggcttgcaggatatgctgcaagctgctgctaaagctactaacatcgcagcttggccttttaaagaaacatttaaacagaaattgacaaggcttttaaacagacatatacagtggcttaacacaaagaacttgttgaaaaaataacacccaccccaaaggggctagctgtgttaaatatatatgatttttttcacacagcaagatccatcatcttagtttttagcatcttggtggaaaaaggggagcatcatctgccggaaacagtgaaggatacctaattttctccatcgacactgcacctcattcccactcagtcccagcactcagttaaatgggacctctcgcttcattggggtgaggagggatagcttccaaacaacagggagtgaaattcgtagcagaaaccaaaacagaatactttctatgtatgatctagtatgaccggatggattaactgcatatttgagggcatttctagtttatttctacatagccacagtcctaaaaacaaaacaaaacaaaaaaccacacacacaaaacgtatactcctatagacacagaatcacacaaatgttttcactttttggatggaagtctgtttaacaggagactgttttttcactctagagagaatttccaaattacttgggtcataattgtataaaataaactatcctgttttcaaaaatggaatccttgttaagttggaagaagcaggtcttgcctgtagctaaaattctgagactttttagccttgcttaaagaaatgcgaaaccatatatgaataatattttcccctttaattaaaatccttccttttattcaggttgatttatagctagctcagaaccaataaatttatatgaattgtgtggccctgtgagagctcattttaagactccttaaaaactgactgtggtatgtctgaagttcatgcagttgtattgaaattatcaatgacccatttgacccaaactcctcaggaagtctcagacatgtggagtctcaaagattccccatcagttcagcagtgaatgatggtgaggccctcactaacaaaatgggggagagcgaaatggtagaattcagccatcgagccaaagatggcggccctgctgtgcaatcagaggtctgtgcaccacagagtaaggagaggggctccaaagctgcaggcaatttccatcatcctaacgagaaagcagtccaagagtgttttctgccggtggtgggctcctgcaagggcgggtgaggataagcggccctgaatactggttggaagcccaaggctttgttaccaggcctcagaggccctggatagtcagaaaatggtgagcatggtagacaaagaaagcatggcacggggagggagccgtcctgaaggccatagccgtagggcccagtgaagaggtcgccccaacgccccaagtaccgaacctgtcatggcctcctcttctcttaggacaaagataagacttggcctccccaattggaatggccaatttaggatcacattgtccacccttgatagtaaacaggaccaggaaaagtgcctgagaagttgcctcctaccaagagactcatcagattgtttatgtgatgggtttatctttgcctgcaagttcagaagagaagtaggctcccatcacagaaatggccatgagccaagggggccaggacaacagcagaagtgctccagagagaagggccctgccaggctccatgagaaggtggcctcactcattcgctggagtcagagtccctgctgggaagaggggcccaggacacagctgcagaagcctgtcctctcaaatactctgcaatcaggagcttgctgtcccttcgttcccaaacctgccgtctgatcacaagccaggacccactctgtcactcttagcacaacacgatgccgctgctatcaagcccttgtccacccacagagtgggcagtgcagacaaggagggaaaatacgcgagaacccagacatgtctgtgcagccgtggagtagaagaccaaatacttgcaggctttgaaaccaacccctgagtgttttggagagttttatataaactttggaatgggtggtttaatttttttctttctttctttctttctttttttaaaatttcagactttggattgaattaccctattttccgcaaatttagattacacaaaagtgctttgtgagcctttgttgtaatttttgatgagatttacatcaaattctttttatagtccaatattatttcacagactgtgaattttatgtatctctagatttcaaaatacgtttgattttgagccatgtttccaataaaatccataaagaaagttatggaattgtccaggtgagccatgttctacctctagactgcccttccagggagcagccccggtgaaggcggtctcagaagaggcggcgtttccctaatcccggaggcatctgcaaggcgccttctcagctcctcaacagacacatcaccatatgccgataccttttgtttccggttgtcccatctgtttgatggtgcactgagccaggtcactctgaatagcttcccaatcacagtaattacccctgagactggcacagagctggttggctaaaacctagaaatgaaatcatcttcattctatttactccttaaagttgagttttaaaaaagtaattgatttttgtcttcagtgatttctccttggaatcactaactggagctctcccaggattgcatgtttgtgttggtattaactgcgtttctaactctctcctaatcgtcacctccattattttaccgaaaacttaatttggactttccagaatgactctacctctcttcatttctgtcttaaaatgtagaacctgcattgctttgtttctgtctcccacttcatgttcccactttcctccccaggacttcatgactctgcaaaagaaaactaacacatttttacatttaagcaaatttctcctcaccctagagtgtgtgttgctaggacctgctgatttgtgtgtgttcacattttttcaagtgttcgctttagcgctttttatagatacctatttttaccagatcatcactgcttcttaattgttctcaaatctttttcattattgttcaaatcggattttaaatagcagagtggcactaaacctttagataatgtttctgaatctcatccctttctctcttattagtgagatcacttccccttgatgccattttctttttcgcagatattcgtaaaatccccagagatgttttcctttctcgaggacactcagaattccctttggcagccttctcctcttccctgtttgtgatgtttcaggaactgagagtgcagggaatgctgtcagatgagtggtcccaatgtaaagattaacttcatctttattctgcgaaaaagcaaaacatgagaaaaagatgcaagaaaaagatgcaagcttccccttcactttttcaccctttctctttgtcccgtctctgctgtcattccagtacttttatcacagtgactgaacacatctccctagaaagctatgactagaatgggtgacaacccaacataattaatgatctaattggctcttggttttccagtctctcagctcccaaatttttcggtgcttattatccactttttcatgtattatttaggcttaggatttacattttagcctcccccttttttgtagcatcacatccaaatctctaaagatttcacatttttaaaagtcataaaaagttgtagttagaggactgcttgtttcagctgcgttaatggagccctcctgggagctggaccctgaaataaggaaatggtgtggatactgtctctctagcagttcagggaccagcagtgcagacctttgcaccttgatcaacgaacacaggactcacacacaactttaagcactggcccaagaataagccaggaagcagcattattcataatagcccaaacctggaaataatccagacgtccatcagctggtgaatggataaacatacaatgaaatacactgctcagcaataaagaggaacagagcctactgatatatgcagcagcacggatgaaactcaaaacattatgctaagtgaaagaagatggacataaaaagcctcatagtgtgtgattccatttatatgaaatttctagaggaggcaaagcaatggagacacaaagcagatcaggttgccagggactggggatgggaggaaggattgactgcaagcaggcgaggggggtttcagggagtgatggccgtgctttaaaatggattgtggttatggctgcatgactatataaacttactaaaaataattaagatgtacatttacattgataaattctgaggcatgtaaattataagtcaataaagctgatggggtcagtgggagagaaagagaggagaggagaagaaggaggaggaggaaaaggaggaggaggaggaaatgacagaggaggaagaggaaatgaaattgacagagaacaaggaggaggaggaggccacaaagatgaccacgaaggtgatgatgacaatgaagaggaggaggcatgtaaattataagtcaataaagctgatggggtcagtgggagagaaagagaggagaggagaagaaggaggaggaggaggaggaagaggaggaggaggaggagctgccactgctgctgggaagacacaatcgggcatatattttcaagtagactctattctcctaagaattatctcttacttaaggattaatatttctcttctggtcttcctcttgggagtgaacagtttcagatttaaagccaccgactgagaatcagcccaccggccagtcctgttcaatgcacagcctaacgtaggcaaagtaatcacacttacgattgttttgatatatatgaaaccagaaaataatcctgggttatctgttgtctctaaatgaagaactataagcaaattctctctctctctctctctctctctctctctctctttggaagtgtattttcattgttataggcaatcatttatttgttggaactggggtctcttctgtctgttattgtcattactttgtctaaggacaggacaatgtccttgatttcacaaacttttgtgaattccacaccgttaccttccatagccagagccaagactttctcagtgttttcccataatggaaattcttagatcagtcaggtcttgtttaaatttaccatcaatctccacactcaaaatataagtcacatcttcattcattaatttgctgggagctattcccagcacgtgaaattagtccaactgctgcatttagccacagacactgtgttctactgtttcctgacaaagccccgtccgtactgaggaagcacactccctattattcactgccgctctatcttgatagaggtcagaaaatgattcttctcttctgaaaagtattcatgctgcagagcaaagggcagagctgtgaagtcccacatgacatgcatgaaatacagtcagtagcgtgtactcacaggctgtaaggaaaacggctgcaggtgatccctctccccggcagtcagagtccgttttccgtctttcgcctatgtaaggcttcactgtaaagtgacttgcgtccctggcaatgtatcctctaatacatagtggacccatatagttagaaagctttattggatgggatcggttggctaactatgtgaaggagtctttgcattggtattgtccttaccctaaattctggtattccaatacaagtgtctatagaactctaccaccagaaaaagaaaatatggacttctaatcgctttctgggtcagtttccacttgcagtggtggcatcatcattattttttgattggccatttgattttgaggctgacatgttgcagcagaatgggcaatagaaatcaattactaagattaaaatacagcttttacaacagtgagtggaaaggactgaccttctaaattaacagcagcctaaatggaaagcctactttcttgtgttgcttaattcacatctggggacctgatttaaacatgtcttgcgctgttgttgccatggttgctttgcccatcccatcaacctcatcctgtcacttttctctctgacttctttctctgcccacatctctccctccctgctgctcccgtctcctgtcttcttctggccatttgagatgttccagcagaagatgacccttccccttgtgcgctggaaacgggccacgggcggcagtgccagaacggcacggtgtgcaagcccggctgggatggtcccaagcacggcatcaccaactttgacaactttgccttcgccatgctcacggtgttccagtgcatcaccatggagggctggacggacgtgctgtactgggtacgtagcatgagtgggcagtcagagggtgggggaacagcggccgtgaacccttccctgacacctccctttctcctcctccccatggtcttggggtcacatacgcatcttgatggaatggttgatgaagagcgtctttgatttcttccaggtcttgcctgagaaacaaggcatgagcttttcaccctaacgagtcccctcccccacccgccagccttaggggaaggtcatttttccagtgcgtcccacagtgcaaaaccctggtgtgcaggcatggatgagctggccaggctggcacaagggttccgttcaactcctcctcccatgcagagttccttctgccctcatccttttcttgcctctttcctcaaaagggagctagaaggcagaattatgtattcttagggcagaagagaagaagtcctgatcttctaaaaagaagttatataaagaaaccatttttattgaattgtgtagcattgtgacatgctattcaatttttactttttattttactcttaccttaacatattagaatagtccatcagacaaatgcattggcagcatttttactattccccaaacatgctgctggtcatgtgatgcctatttagaaatacactttttttttttaatttttattttactttaggttctgggatacatgtgtagaacgtgcaggtttgctgcataggtatacatgagacatggtggtttgttgcacccatccacccgtcatctattaagccccacatacattaggtagagaaataccacttctcgagagccacccaatcaatagcaaatcttcgtttaccttaaagttgccccttttattacccagtagccaacactactttgctgcgctttgagcctctgaagtgccagatttttgtacagcctaccccacaggcaaatccacactccatatttgagctgtctcgattctggcaaagtccattattaggaaaaactccagaaaatttattcttcatagtgtctccaacttcagcctgagaaatgacttgccagaatccagtgttgttctccagaatttgggcgaataaagcatgctgccagtcttaaaaataccatctccttcagagttttgcaaataggcaaatttatttggccatcgtgaaaacaatctaagagcctgctcagggaacatgtctacaaaccaaagcagggaagagtgagaggggagcaaatgcttcccgttgagcagagctgccagatcaaaaggaaatcatgccaagagaggcgttgacttcttcctgaatcggaaggaagagttttgtaactgtacggagatttggtgcacagtattctgtcatatgatttctttaaaagcaccatgtcctgttgattcagaatccctctttctcagtttttacatgatagtcaatatgccaaaccccagtgttgctatgacatgtgtccctccctctgtaagtgacaacttgaaacttgcccgaggaccttgtacccagcaaacatttcctgagtgtccttgcctgccaggggtgctcctaggctctgaggattcagtcataaataagatccagtccagtccaattatctcagtctaggaagccaactaaactctaaactgagtaatggcagtatggctggacccatgccgcggcaaagctgctgtgttgtgatactttcaaaaagaagacaaaggtcagaacccctctgcctcaaactaaaatgaaacactggaaaacatttctgagattcatgctcaataagaccttggttttgaataatttgtaagacagaaggaattgaacttattacacttagggaaacttattttgtttagcaaagcagacaaaattcccaagtggacctagctggtccttcttcctggggtgggtccctctgaccagccaaggacagaaacatccttctgccaacaggcagtttctgcctacaggccacataggataaatgattgtgtgggactgtgctttggggcctcatcccataagcttcaggcccatgcattccatggcatcaaactgagggcaggtggcagtggagggtgggtggagggtaggaatagatatgactgcctttgctgatgtatttttgtgttcttccttcaccactcccttcttctcccaccaccacaagtcattgatgccccaccagccagatgtgatccaaagaaatactgtcataatgacagccggggcggggagcagaagcagcaacaactgcaaccaccaattttcagcagctgtgttgtgccttctcccctggggagcgtgtgatagtgctcaggctgggaatggaaacagtgtcagaggtgaagaaacaatcccaggctcatgggacatgcctctctctgattttcccagcaccttcccaaaatggccatgttgtgtgtgtgtgcatttgtatgtgtgtgcacgcctgcaagtgtgtatacacacacgtgcacatacacacacctaaaactgaaacttgggtattcatgatagaagccctgcctagcccagtgctcctgctttcaatttctctaattgctttgacctttctacggctgtttcttccttcttcctccctctccctcttcctttctctccagtgtccctcctccttagcttctaggccagtatctctaaagcacagactctcaaatctcaaaatgttctagcatcaaacatagagctttgtaaatataaaaatacccaaacctccctcagagccattgaattagaagctctaaagtcggggccccagtatctgcattttgaaaaagctctccaggtgattctgatttccaggctggagtttgaaaacgctggaaatctaacctgttgaacctcatggtgctggtatgatgctgctggctttgaacccttctaaggagatagtttccacagggaggagggggaaataaggcctttcactcagaagaatgaattgtccttcaggcacaagggcaagtctaaaggacttgagaaggagcagccaagattttcaaatatagtaatgcatggaaaccccagagctccattcattctaaatcaccaaacagctggaaaagagtaagtcactaaagcatcaaagaagcgattggtcagccgctggttatggcctgagatagaagggatcagggaaggcacctagcagatggcagcacttgcttccagttgtggatgatacagtatctttctcttttcctctaacatccgttattgcattccattgttagattttaaagagtggactaaaaataaaatcagacttggtcgagtaatacttgaacattgcttcagctatgaaagccattggccatgcattgcattgaggctccaacaagccgagcaatttgctgaaaacatttcttctacctaatatcctgtttgaggagtgtgcagatgacagaataaggaagggtggataccggggatttggaaatgaaacaaaactcgggtttggtgtatagtttccttaggaaattacttcttaagccaaaggctcatcctttactctcagaatgtccaagactcttaaaaacagatgggtaggtgtggggagtgtgatcagataaaaagcgctggccttcttcagaggcagtgaagcaccaaggagggaagaacctaatgtgtaacgttaccattgttttccattcttagtttcacgttttgtttttttcaaaaatctaaacatccctagccttttgcacatcattcaaggctgcttgtctcccatggtctacgcatgagccatctcaaagatgtaaagtctgctgggtcagcctcctttgcaggaccttgtcgataggattcataggcatgctctgagaattccagttggtttgaaactctgagcatgacctcttacacactgtgggcagtcacaatcaggtaacagaaatatccatcaattaaacatcttttcagtgctgactttgtgttcagcacttgagatgaggcccctgctcatgggaaacagaatgacatggccactgataggggttggggacacacgcagaacgttgcaggtgagaattgtggaaggggggcagcagctagactaggcatcacactagaggatgtgtttctagctctttaggaatctcaatgcctggataattcatcaggagcattctgttgacttctgtccaccccatgcccttctgggatccccaagaatgttgcacactgtgaaccacagtaaagagcctctggcccgcgttatcctgggttcatgccccttcccatcctattgggaccaccctcttcctgacaccacccattgcccctgcattagtttctccgtgatcagttcttcgactgatttttttttacaagttaaaaattaaacttaaaaattaggttataaaaaatacttaatgagaaatcatctaaaagaaagatttttttagagtcacaaatagtgtgttctctagaacctggaatttgttttggttcagccaacaggagactcttggaacaaaaatctaatgagttaacttttcataagtcacttgtcagctccacccttcatcttgccatcccactatgtgtctggatgtgcggagaaggtatttctattaaattcacacacacacacacacacacacacacacacacaacagctattaatctcttggtattggtgctgctgaaatatccctcgtttatgacaaagaccttttgcatccaagcaggttgaattgggtgttttaccctatttttgtctactccatcttcacaaagccacctcctttcactgcagaatatagagttgctgaaggcttcataaaagttagagctgaattctgctgatgacctaggagtcattctaagtgaggagctgagaaaccctcaagtaacccagaaacagtgtccagggccctttctcaggtatcggagtagagaccgtgttaggacctctgtggtccctgacttttcacctgcctccgtgctacccccagggtgcacctgttgcctaaaatggagaatccctgatctaaacagtaaactggctgttcagaagcatatcaaggaagagagtcagcatctctcaaagccattctttatttatttattgggtttcattttatttattttgctggtattagatgagtccttatgattctgtaatttaatttagcaaacatttattgagcatttgctgtttcctgggacgagggatgtgggagcacagagaagaataaggcctgcccaggcagttcaggtctaactaaagagttgcaggacatgcggaggaacacagctgagccatgggggtcagtgccctctgtgggagcaggacagccctgaggggcacagagcactccaggaccaagtggggctttactggaccaggagagaaggctcttctgcctggggaaagcaagctttgtctcagtttgggaggccgcagagacctgggttttaggttctctcaacattgctatggctgtcagccagttgtctcctgcacaggtcttcacacactggggcccactactctctatgacagctcccaacctcccacatgatgtcagcacatgagtccatctgattccagggagtttgaaatgcatggaggagcttattttgttggcttgccttggtgttaggagcttgttgttttcttcccccatgtaaactaagcttttacctgggctctgaggcactcccgggttttcagcactcaataagcaggtgcaggggtggggagcagccaggtggagcctgttccacaacttcctgctcacttggtgctccgtgaggtagctgcccgtgtcccagcaagcaaggtgacatagattctgaaagccgcaggttgatggagctattgccctgagctgactggtgttcactggcagcagcagatcctgtcccccagtgacagtgtaaagcaccgtggctttcacagatttacacctcctgcctttcgatggcaggtgtcagcctctctctcgacatttgctgaaacgattcagcctttttggatccacagtgcctgtgccaagaaccttacaggaaaggtacacacagcttgagaacccgtggaagtctgctgggctggggagttggcctcgaggagaggggctagggaagcttattcccctgtttatctttttggggaaagataaaaagtggacttgagggtttaaatctggggttcccttcaaggaattagatgctggttgccgaaaggtctttgatagtgttcattcaatgctccctccctttgtagtgaggctgtttcagccaaggcaggggccgtcctgccagtacttgggcctggaggccctcaaggctacagacaatgagctgactttccttaggaaagtcaggagacctgaggaacacggcttaatggctctagaagacctatcccttatttcacctctaaataagggtgtcagcaatctgggtcatttttttttttaaatctgactttattctttgtcttcttaatagctccatttcagctgctttaggacatcaatctcatgactccaggcatcgccctacttcagagccacccagctttgtgtgctctctactcagctgtccccccaaagtaggtggaccagaataaagaggagaaagtaagagggaagtgaaaggagaactttcctttcagaccagagccaggcaggccagagaatcaccttctgtggcagccgagcattgctcacccaggcagtggggttctgaggaccaccctggcctcgtccgtctccatctctcatctgtcctcctgcttcctgccctcgcctgctgttccccatctcgaacctctaaaaaaccagcccacagcccaggggggaccaaagcagcagtgtgggacggcgagggggacccatgagtttcctcttatggtcctggctgtctgtggggccatgaccttgaggtctgtagctccccctttgaagtccttcatatgctggaagcctctcaccttgtgtgtggcgcagaagaaaggattcccagactaagctcgggccttaggaaatctccaaggcgcgtgggtttgtgtggcctccaaggctgcattttctgtgaggttaaatgttcacaaaatttaaggggtgtgaggaactagtgaggaaagatttcattttgaggaagttgcctgggcgccatcgagcccaactcccactcgccatctgcccaggctccagaggcagctttgggaggggaactgtggtgagcacgtcgtggcctcctggaactggctgctcccacgtgtcctgaagaaggtggggtctgtgacccagagaggagcaaggggagtttgccaagaacagacatcctctgccactcttgatcccctgacgcacacggggcaagctcctttggggtcgaacagaacagaccagttgtttggagtaggtcagtaccatggggttctgcacgcgcttcagggtgccggcgtgccctcgaggctgtctgcaggatgctgtgtgtgtgcagtgcacattactgctggtgggagtccatagttctcaaaagcttttcctgactgccccaccctctcaaaaaagtaaagcaggccgggggcagtggctcatgcctgtaatcccagcactttgggaggccgaggtgggcggatcacgaggtcaggagatcgagaccatcctggctaacacggtgaaaccccgtctctactttaaaaaaaaaaaaaaattagccaggtgtggtggcgggtgcctgtagtccctgctactcgggaggctgaggcaggagaatggcatgaacccaggaggtggagcttgctgtgagccaagatcacgccactgcacctccagcctgggcgacagagtgagactccacctcaaaaaaaaaaaaaaaaaaaaaaaaagtaaagcaatactcatttagaggaaaagaaagggactgcttctgaccctccttagcaggacttactctgagagaggaaaagctacaaggacacccacaggctccccctgaccttggatccaggtttccctcttcctcagcaggtgcctgggactcccattccagggctgtctcaaccccattgccttccctgtatcagagagtccgatacacaacagaacccttacacaagtaggcgctcggtaaatacttgttgaacaaacgtggactctgatgtgaccactgctaagaatagtcaaagaatgacctcacggttcccatcgtcaaatgggacctgcagaccacagcccatcgtggccagcacggctgtcagtgtggcctgtggtcaggcagctcatgtggctctcatgcctttctctccctaatctcatgtcaccaatcccacccatcctgtattggctcgggtttgtttttcttctcctggtgctgaagtctggtgtggtttcctttgcactgttggttcagacagttaccttatcgctaaaggaaagctcccaggctccctgggatggggacagtgtctgacacacaaggacctttcaccccgcctctcctaacagatgctcttttgctggatattttagtagttcagccactgggagaatctttgcagccaggatggcctcacagccataggctctatttttaacaattgccgacttctgcaaacctccattgctatcataggaccacatggactctggggcttccttcctgctctttatctccgttgccttcagtggctgtgcagtgcaaggttgacacaggcctgctgagcctggcccttgcccccctcagcctcacgcagacactcttccactggtggaagccttctgggaccctgcgtgcttccttctgcagttgcagctgccagcctgcactgtagctgcctggtcatttcctgtctcccctccagcaaggatttcgtgtttacagcacagtacctagcacatatcaggttcactcattcactcaaagagcgttagctgaggacctactatgtgcgaggcatcgttgtaggcacctggggtacacccgtgaacaaagcaggccagaaccaactgtcctcggggagctcacattctagcatggaagacaaacagcaaataatacacgtaataaataggtaatgatacagttaccaagtgagaagtgctctgggaaagcaaaccagatgtgagaaaatgggcatgctcagtaaacccacgttcaattgaatttcacgatggcatggccaagtgggcacacactgggaatcttcttgccccagacacgatatttgcactatgcacaatgattatgttgggtgaattttcctaaccaaaatttagtaatatcagatacatctcaatggatctgtaaagaacatattgggatgtaacacttcataccagtcagactagctaggtgtctcggtacttctcagtcttttattcccggcatgcagagaacatgtttatccagcgtacttagacaaatgcatgtggctgctgaagctgcaaagcccaagggctgagggtattactatcccacctgcctgaactcctttgaggcccctgggtggaaatcgtggggtggttatcaaacttgagcatagcctagaatcacctgggatggttaatatgcagactgtgggccaccctgagatcttgggggcatggggcaggaatctgctttgttcataactctcccagatgtttctgatgctggtggtccttggaccacactttgaggaacactgctatgcaaccttgtggaggtacatggagagccacacacttgtgttgttacatttgaaattgggagctatggagagaacaatgtgatcagtggtgctcaagcatgcatcagaatcacctgtagggccgtcaaaacgtgggttgctgggccttccccacagtgtcagggtgaggtctaggtatgtgcatttctgaacaggtccccaggtgacgctgaagctgttcgtccgtgggccacactttgagagccattgatgtgaatcattcaggacacttgtgtgccttggaagtttgggtttctatgagctagtttcacaaggacaaagttgggtgcatttttaggaagccagaacttaaccctgtttagtcagaaggcatcagaagagatagctttgagaaactaaatcagaataaatttcctctgatggaagcacagctctgcaatttatcttcacgtccaccctccagccagtggtgagctaataaatgtttaagcatctcttcttagggtcagcgggtacagggggctgatttattgcttgcctatctctgtggtgtaaatacttccaccatggtcagtttcaagctgccagtgtggtcaacgaacacggagctgggaagagatgtgcacggtgagctcccctcagcccccaggagccagctccggcgcaccactccctctggctgccgtaggggtttgtgacctttcagggcgttctccaccattcagtagttacagtcagtttccacattaaggaccatttacccctaagctgtggttgcagtcacaggacccttctctgaatacataaaccaaaatgattgcctctcccagccggtggcccgcagtacgtgtgaagcactggggtttagcctctaacttccgggcttggcccacggtccaggtggccaaggttatcttctgaggaaggttatctttcctcacacctcctctgtggtttcagttctccaggcctgtcagcaggagctgacgcacttcatacaccaaggtcaggggcctccgggtgcaacagaaggcttaatgtccaggcaaacccaagtgagttaaaccatcccatgctgaagaaattattttttgaggtgacccattttctcagacaagtgaatagaaaacattggagaaatgtttctttttcagaaaataaaaccacagagagacagagtgattcctcttgaggcagagcgggccgaggtccccttcggtcacaggagttcctttgaacatgggcgatgccctgggtaacacgggtaacctggtgcacatgaacaaagcccacgttcagccccgtctgtcccctcccaatctgctcacacctgctgcctgcctctttgctgtaacccaattctgcttcttctttcctaactttccttcgtctttccagatgcaggacgctatgggctatgagttaccctgggtgtattttgtcagtctggtcatctttggatcctttttcgttctaaatctggttctcggtgtgttgagcgggtaagctgaccgtttctatgtcctctccacaacgcagccgagcaaggtctcaggttccactccgtacatgcccggggtcctcagggatgggaccctgacaggcccaggaaaaccacaacaaagcctctgttcaaccacagattctgacccattggccaggcaggctgtttggcctctgatttgcacctagagggtccccggatcctggcgctgcgtgggtcagtgtctcgggagccggggaccggcactggccgtgctcggttgctgagtgtgcctcactaactatcattccgttcttccaggtcaatgatgccgtaggaagggactggccctggatctattttgttacactaatcatcatagggtcattttttgtacttaacttggttctcggtgtgcttagcgggtaagcaggaccaaggaaaaaggtcttgatttttccatttatttttatttattctttctgctattcctggctgtattctttttctggctctgatgaacctgggataaggggtcaccacaggagccttgaagtggatgtccttgtcctggctgggtaaagggtcagatgtgccactggtcttggtggtggacaatggaggagagctggcttcaccacaaaaagtgggtccagctggcccctcccagcctcaagtagctgtccaggcaggcagggcacttctccttgtgccttcgtggcctctggtgaacaggcctgggtaagaaaagactggtttaaaacataaacaaagacagactcaaaatctaattctcattttacttcatagactgagcagtctatctctgagtttccttttctgaatggaaaggacccttaactgtttaaagccatatattatttaagaatagaggagatgggatgcaatttcctctaactttatatctagttggctgcaagtatcacatctacctaatttcagcccttgctcagatgaagttagaagtggtagaagtaaccgggcatggtggtgcacacctgtagacccagcaactcagaaggctgagacaggaggatcacttgagcccaggagttcaaggctgcagtgagctatgatcgtgccactgcactgcagcctgggcaacatagcgagaccccatggtagaagtagcacgtggttggaaggaagcacctgaggatggccaccttttcaccatggaaacgcataggatatttcctcaacccactttcttcttcagaagtccacaccagccatgccaaggcctaacacctaaatgctcctggtgacctgctcatgggtaacccactctgctgcctttgccacttgggggaggggggtaatctacttctactctgcttgagactggtcagctgctttgcagagtcttccctaaatgtctagagaggttaatgctgggagaaatttaagcataaagacaaagattgctctccactttcccccagtacctaaactgggaatcgctactcccagctcctacagctgccctaatgcagttcagagcagtgggcttggccttcagagctgcgtagaggaaagaatctcctcccagctcttccacctcccatggagaatggcccagtagagaccttgatgacaaaatgccttttgctaaggtgaggccacacaggagactagtgccttccatcagggataacagtgatgagcagaacaacgtaagtccctgattcattgcctggaaggtagagaggttttcagttttatgttcaaacacaagaaaatgcccatgtgtttatatgtgaatctctaaggaaaagattgaaaaaatcaacctcatcaccctgaatcaaagcagaaattgaggcatcccagctctgcccttgctgggtacataatgttgggtggtttcacctttttaaatcttagtttccccatctgaaaaagtgaagctgataattccagtgcataggtggctgtgatgatagaataagatcattttcagaatacttaacacagtggtatataataagtgcccaataatggtgctatcattacaatgattattatttacttggtgcctgttataactagaagtatagaatcatcaaatattagacatgctccagcctttcctcttaaagatgaggagcgtgagcccagagatgttaagtgatttgtacaacgtcacttccctggtaagtagcagaaccagagccagccctcaaggcaccgcctcccatgagatctatgatgaatgagcttgaactgcaacacaagccacagctcaagacttttaaaagaatgtaactccactttcttcccctggagactgggaaccaaatctgagcaagtaaccccccaccaagagcctgaagtggagaatgagggctgggccctgagggtcctccctgagcagagcgtctgcccaggaatcaaagcagtgaagtcaagtgacagaaactgctgatgttggggaagaagccactttgaaggccatatcttggctgactcagcctaaaagcgctagggtgtatttagacccctcaccccaaacctggagcttagtaatattcaaaaatgttggttgactcagaacaagaacattaaggctatctgacctctgaacttaggagtctttgagtcgatacgctggtctttcctggagaccttcgccagcctctgtttcctgacctgttctgagagctgccgtctgctccttgcagctcctgaatcactgatagaacatctgccaaggcttccttggccaaaggtctgccctaaagagcaaagatgtgtgtatgggcgagcacctcccctttctggtttaaggaggcctctcctcatgtgtcaagggctggccactctgaattggttgcccccgccccatgcagtgccaaagctggaatcagcttctgttggctgaccactcagaggcaacggtttccagtcagtgtcttgattagccaggaccgtagaatagtcacacacttactgggtgcagatgtagttgaccatgcagtcaaacacccacttattcatcagacttctgattaagctacacttccagaagcattcaaaaaggtctcactgctccatgaaattgactgtcacattaacagtcactagcattctctgtgtcaggctccgtgctcggcgtgttcgctagattcgctcagttaatgctcatggcaactcagtgagctggtgctattcctgtgtccattctacagagaaggcaagtgaagctcaccaggcaaaatgacctcaatcccagcaggtgagaaatgcaggatgcagagctgagcccaagcgatgtgaatccatcacttctatccctgacctctgtggtgtactctccccaaacccataggacgggttcatcccatgcttttaaatgacaggcgagaaatggagaggggaagagcagaagctgcagtaggaagggtgagaggagcgagcaggcaggcacagaagcaatcagcacagactgcgggaaacagccagcaggcacacagaatcccagcaggaagctgcgaaggcaaccgcccagaggcctgcagcagggctgggctgcttagcagagggaccggcagccctgcagatcttcatggcccttgaaagagagcaaagccactaactgaatagcactgcagtcttggagccttctgggactgggagaagtgggtgtgaaaccctgcattccaacaattaaggataatatgattttatagccctgcacagtaactcatcctcataaattatgtccttcagtcactaaggaaagattgaacggtgcttggtgtgttgtgcttgtgaaggtagagaagatgactccataaagcttccatttaaagtgtggaaattcagggctgcgcatggtggctcatgcctataatcccagtgttgggagactgaagcaagagaatcatgcgaagctaggagtttgagatcagcctgggcgacatagtgagaccctttctctacaaagaaaatattttttaattagctgggcttggtggcagcacctatagtcccaggtattcgggaagccgaggtgggaggatcacttgagtccaggagtttgaggctgcagtgagccatagtcatgccactgcactccagcctgggtgacagagcgagactctgtctctaaaagtaaaaaagaaaaaatttttaatggaaattcaaagacttttggccctgagagggttagacctcttctatctggatcatgcacacatccagaacacctatttctgatgaggccagataaagtcaatataaagaatagatattaaaggattttttcaaaatactttattatctgatggtcctcacattaaccctatgcaagacataggactggtgctcttatggataataatcagattatgattacttcccctcagaaagctcaatctccagtcgactagaataaagacaacggtgatgatgacattcttgaaattgcacttgaagctgtaatgaggtggaagcctctggactctggttgctttttgttttaagcgactgcaaacagagggcttgggaagtgcgcctccagttggcaagaggcccacgatttcttacataggtagtcatcccatcccttttcccactgggagatgggcatgtcttgtccccaaaaagcagaggacccgggaggtaggcattttacagccaggaagtatcgctggaccatggcccacagttaagacacagtatctgggaccagaagaaagcaataaaaggtcaggacacacgtgccttgtgggtgggagcagaagagatggcccaacatacacagtcatgttatggaatgtaacccttacatgttatggaatgtaacccttattcatgacggttacattccataaagtcaccacaaacatgaagtagtggacactgagacgttggtcctgaggaactacagagttgtttcctgtgagcctctgcccacattttgtcaaccaatcaatacataaccttgttttaagtgtgtttctatttaaagacaccttatttaatatatatgattgattcatgaacattaaactcctggccactagcaccgtaactcgcacctgcgtgaagcttatttaatgcacgtgttttctctgtgcagcacatcatagccctcctacgcatagtgacacaggacggcacttcagcattatgcttggggccattttaaacagcaaaatcaccaacaaaaagcacaaaaatgagaaaacatggcactaagtggacggtgaaaaggacacctcacagtatgagagctgaattgggaaggcagaactctacatgccccttgtttggcctcagcgggaacatgtagagtttttgtcatctgcacatgtccacagatgactgaaagtgccacgagtattgattctggagttacaaacacattttagtgagtaggcgcatttgtagatgtgggatccacaaataaggagcctgggtggtatcgatgatcaaagggcctagcacacctcaggctattggttggattccacacacaccgccctgtgcatgcttcacatcgctgagccctggcccctggctctccacaccacccctcatttttcatgttggccattgctggcgagagatgcagtcctgtctcgtgacaaatcccacagctgtgactgattgtcttgccggcttcagtccctgggcccagtgcagactgtcaggctggggctccatgtcttcattagctcagtccccagagcaggaacatggctggcatccaggcaaggagataaagagagccaggcactgccaccagcagatcctttaccgtgggaaaccttggctcatcttccatccagcctcaagcctgtctgtgcctcatactccatgggatccagccatgctccagatctgactaaagcccttctccatccctctcacactcccaaaacacatccttcctctatgaggaaaattatcttcaagccaggcagaatcaccagcatacctcgtgttctgtttctccccctgtaatgtttattttagatccccagaggccttggggtatagatggtgagcttcattccatgggactgttgctgtaaaacaggattgggccaattgtccctattccagttgagtcccagtcctattctcccaattccaaaagaaggatgggaaggtgttttgtaaccagaacttgaaccctctgcaaagtcactcaaaagagctgaagtgagcccttacaagggactgtgaagttcagccccttgcaactccaaacccaccccagaggggtgcaaatggaggtagacagaaagacagtcaagagaggaggccttgaaacatagtttttggagttgatttgcatagggagaaaaatgctatatgaggttactgtctccaggagcaagactaaggccccgaaggcttaaccaggtacaggggataagaggttaggaggagaggggatggcatctctctatgatcatccccagaagggaaggagcaaagtttccctcgccattgtgagctgtcaatctgtcccttttccctagcataaaagtccttgggaaaaaaatgaaggtacccactggttggcaggaagcccaagaaacagcaagtacaatccaattagaattggattcaatcaaatttaagaagaaaattcaatccaaaccagagcatcattaaggcagcagttgaagagaactggttagcttgacagcccccacattctcccaattaaaaagttccctaggccccaccccagccccaactccatctcaccataaagacggtgcatgctgaaattagtgctctcccaagtggcacaggccaaatgcaagcactaggcagtgcaggtagtgatggagctgccccacatgacagtagactcagaagcagagccctttgccctcttatggtttgtggtgctgtccctccttccatggtgcctttcctagagtgtggcttcagcaaaaaattctccaaggtgcttccagcagcctcgtgccctgaactgggccttcatgggtgagagaggaagacatcatggctccaagaattaaccaagatgtcctatgcatgtacacacacacacacacacacaaatacacacatacatgcaccaccaagggcctcattccccaaagactgcatatcaaaaccaaaaatactcccctatgcctattttgcaagaaaaggcacagacttgctttgagggttgagaattcactttgttgatgattgccttctcctgccagcctcctccttgctcagaaagtgaattcgaagtcagagagaaaattaggacagaatcatagaaaagaaatagttattgtgtcagaaatttttcaataggccattcttccagcaaatcccaccccagtttcaatttctactcattattactttaaatcaaatgcatcatttaacttttatatcatcttgattttatgtatttttctattctgattggatttctttaaaccaaaagggcagcccccaggacattttcttgtgtttggaatcttcatttgtcttcatgtgggagagaaccttctctagattagaaatccttccaggaatgctgagtggcaggttgagctcgtcataagaatagagattgaggacattaaatctcctgggtcccaaatcagtggtatactggtaaatatttaacaattggctctctatggggaaagccctggttttcagcatttgccagttaccatggtgtaaatattcccactgtggccgatctcaagctaccagcgagacatccctgaagccagagttgggaagagacatgaatgattggctctcaggacctggggcgagtgagtgggctttggtacactgccggtcctaaaaccttgtgtcacctggagacccttgggagaattttaaactaccactcaatactgggtgggatggaaatgcatgttctggaatggtggtggaggtttttagttactgcttggaacgagttcccaggtcttcggagaacagttattaaaaagcaaagcctgtgatcatgatccaggaaaagagggagatggacttcatccatccccttaagcctctcctggccagtgtcaggaatgtccccttactgacgcttcccatcgaggtgatagtagacctaacctaggctgactagcggagctgtctgtggaaagtaggggcgtgtgggcaggtttctccctgcaaagcaattaagactcttgtttctccttatctccatctctccttccatcctcgacccttctcggtgctccctccttctctgtgctctcctgccctgcccctcctctcactctcaccagagagttttccaaagagagggagaaggccaaggcccggggagatttccagaagctgcgggagaagcagcagctagaagaggatctcaaaggctacctggattggatcactcaggccgaagacatcgatcctgagaatgaggacgaaggcatggatgaggagaagccccgaaacagtgagcagccgtcttcttctgtgtttgggctgggttctgggggagaggagacagcatcggggtcagcacagaactttgaccgccaccctttcttagaagcccacggggtgccttcctggagcagcagttatctcactgatggcagtcacttgctgcacacagacatcggtcacatgtgggaaatcatagctgtcgatctagaaaacctcatgctccttttagaatatttcaccttgaaagactgttgagattttgctaaggcagaggcttttttaaaatcagagatccttctcctccaggttccacctctttgggcaggggcacaggcttcccgtttgaaagcgcaggcttgtttaaaaggaacaatgtgtgccaagcagctgcctggaaaactttatacctgctcaggattccttccccctttgcagatttccatgcaccactgagctttctcataggaaaggtagtgaaaggttttccttaagggggttagattcaaagacctggggaagtgctaagtgggagtgttgggggaagcccagaggaattcggcagaatgcaattaggtgatggaagttgagccaattcccttccttgggggttcacgtggccccttgttggataggctgtggctgagatagaaatgaaagtgatggatgacattgactcacaaatacgtaaaaaatgacggatcatgaaaattcaggctcttaccagactagctccatggttctcaaagcatggccgctgaccagcagcgtcagcattacctggaaacttgttagaaatgcaaagtcttgggccccactccagatctattgacccagaaactgtgggaatggggcccaggaatctctgttttgacaactcccccaggtgatcaagatgcatagtaaatttgagaagctttgggttaactctaaccactctctatatctcatttggccttgatctctgtgactcgaatcatactctttctttctttttctgtgtgtgatatctttctctttcactatacatgtttgaataggtgcatttttgtcctctcaagcagccttacttaaaaacagtttcctaaacactgagcatctagagtactccacgaagcaaacaggttaaagagccatccagggcatttgctgcgtggagtcatgctggtaaagacagggaactggaacttcaccctgagcagagaggatgatgagaagagctgccaggagcagaaacaggtgcaggaagaaaggacgaagatagccaaagatgttcacgggagcagaatctctgctccctcatttcaaagatagctttaataaatctatcaactgctccctttctgataacgctgctcaaggagcaaatacaaaattaaagcacacaaacaacaagggactgttaacaacataatgtagtaacctaaggaggcctttgtgctccattaagtggttttgcaagttggaatacagggcctttgatggattataacaatgagggtcttcctggaaaaatgcctgacaccttctattacactgttgatggaactgaggagtagttgattagtttgtggcactgagtggtatggtaaataaataagttggcctgtgagccacggagaagcctacctctaaaatgcaggaatttgtatgctggctcctggctccaccctaagtcagagcactggtgctaccttgtgactgacggtgatgagcatttctgtagcgcgtgttattgaaaacctgcagtagccactacacgcttagcagccagtggttatccaccgagataacagaacgttgctattctgttctccgcctaaaacaggagcttccaagggagagtgtgctgcttctccatctaacccattaaatgaataaattgttaggagagttcccagcatggagtattatttgctgctggagcagatcacactgacaaggcccatctacccaaatttcttgacaaactttgagaagagcataatgagctgcctaacccaatagacagtctcgctaagattttcctaagcctagataaggatggccttagactctggagactggtttctctcaccttgcactgcttccttacggctggaggagccctgggggtctgtttcttgtcctaagaggactggagtgggagcctggctccttcattagtggaaatgctaattagtgggacagttccaggggatgaggcaggggaatgaatattttaaaaagcaagatgtagagagtaagatagacacatgcaatgaagtggaacgtgagagacaggagtggagctgggaagagactgtgtctgttggggaagtccaattaaaagtagaattgatgtgatgaaatgattaaggaatcagaggcctaattcacttgcaaaaaaggtaagacagtggctcagaaactatcttcctgtcttgagaatttcatagattgctctttgaaacaaatacaaggggagaaatcctgctacgtttgaagcatgtgtgtttcaattaccgtaatatcttagcctttgaaatttctaaaagactatagtatggtatgtttgccaattctcttcagctcaaaagccaagtcatcttttaagagaaaaggccgatcactcttcatcagcagctgtggtgactccgcttctcccctgggcagcatctggatgcccgtggtgtgaggctggggaggtggggctgagtgcagtgcaggagctgcttggtgacacccagcatatcttaggggagcccagggattctgtttccttagggaaagctgcaaaagccaccaaggagtagaaaaaatgggctggaaggacaacagaaagaaagcgtgcagttggggacatttctctaaatattagtgtaagtgaagtggcccgtaagttatatacaaaaatatgttccagttcattcattcattagtccacccatccacacatgaaaggtctgctctctgccaggcactgccatagacactggtgatagagcagtgaacaagggagtcaaaagtccctgccctcgtggaacttagattctagtagagagacaggtggtaaattaaatagcatgccagagaggggggaagcagtgaagggggaagagtgttgagaggttgtgattttaaggggtcagccaaggaatgtctcacgatcgaggcagcattggaataaagacgtggaggctggaaggaaaagcaccatgcagatagttgggaaaggagccttctagaggctagcgagaaggggccaatgagaaggggccacgctgatgaatccggagctgaggaggcttgtgcagctggagaggagggagtaagggggtgaatggtgtaaggtgaggctgtgggacccaaggagtagggtatataaactattgtgagaacttggctcttactgggagtgaaccaaagagcctctgggtatttaattgctattgagcagagaagcaacacgatctgacagacacttatcaggatccgtctgcctgccatgtgcagaatggaatgaaggtgggccagggagaggcaggggtcccgtcaggtgcctgctgcctcaggagatgctgggcctggtcttgacacccatggaagtgataaggtcagacttcaggatgatgtcatttgcagacgcgtcagatatgggatgtgagagagagaggtagggcattttccaaggcaattgtcctaaacgatggcaagaggggaattgtcatttatggatatggggaagtctgtgagaggaacgggtgtcagggcaggaggatcaggaaagccatctgagacctttaagtttgaagtgcctattaaacatccaggtggagatgttgagtatgtaataaggaatgaacctctccaggagagagatctgtggctgaactgtaatttgggaagtcaacaacatatagaagatacttaacccctggatctctggataagatcactggggtgtgagtgtagacagaagtgagatgctgtccaagaactgagtcctagccctactgatgtttggagattgggatacagggaaagaaccagcaaacaggactcctaaaggcatggccagagagacaggagggaatgcaaaggaaggggtgtgagcgttgctgctgtgactggaaactgaccattgggcttagcaatgtggggctcacttgctggtgccttaacacaggctgttggatgaaatgctggggagaaagcttcctggcaaatcagccttaccctgtgcatctctcgagtctgcatgcctcctgcaatggcatggagcgttgctctgcaggcttcttgcttctttggcatggcccagcttccagccatctgaagagtctggccatcaggaaaccagaaagaggagaggaggagactcacacagactctagcatgcccatggcctcaagacagtcagtgtctaaagcttagcccatcacgatgttcccttctacagcaatgccaatactagccactgcctctgcaatgggttacagtcttggaaaaaagaggacgtgatactcaagagccatttcagagccaaaaaggcaaaaaaggggcaagaaaggggcatgtttatgtactgttgccctggatgtggcttcctaagtggggcagccaagagccaagccccttttctctctgggtaaagactaggataatgttgaggtctccccactctagtgactgcttctcccctccctctgagcagcagtgagaagcccctgtgaagggacccattgcagaactgtcattagtgcagggttattgtcatcagcagagatgcactgctcaaagggacagggctcatcttccagctccgacgttaaatctaatagaaggtcagacactacagggagaagccataaagaaaaagagacagattctcttctttttcctcttcaagatgaaaaaacacatctattaaatatccatccttacaggaatctctctttcatgtcattaagacaacttaaatgcaccctggctctctaaagcttgcagttcaatacagacattgatgtggatgagcacgtaaacagacagacagacagtggaaccaaaatattgaatttccatgcagataagcaggattaaatatttaccccatggtatcgagttatgtgactcgggagccacttttgcagtcatcaccagctagcagagccacgtgcctgctgcctgcccaacagagtctaggatcacatattactgagacaggaaattggaaggcttgtaagagctgcaggttgcccacgatagggccccatgtggcttgagagcagtaacctgaatatcgctgatttacattattttatatgtgtcaagggcatgtacatagttatttgatctttaaaaaaaaatcagggccgggcgtggtggctcacgcctgtaatcccaacactttgggaggccgaggcgggtggatcatgaggtcaggagattgagaccatcctggctaacacagtgaaaccccgtctctactaaaaatacaaaaaattagccaggagcggtggcgggctcctgtagtcccagctacttgagaggctgaggcaggagaatggcgtgaacccaggaggcggagcttgcagtgagccgagatcgcgccactgcactccagcctgggcgacagagccagacgctgtctcaaaaaaaaaaaaaaaaatcagtacgatcagtatttatctagatctctcgatacctacaacacaatcccatgtcatggcacatacgagtcacacaaacacatgtgaagcatctggctcagattacatgagaagacatgccaatatttgtttttgtccttgattctgttcataccttgcactgttgagtgatcatgctgccaggccatgaagtgagagcagatccttaaggcagagcctggaagtagctcctgggccttcacgttaactcttagctggtcctaatcagagccctggaaactttagtgctggaaagttgctggagagatcaggtgaggaaactggagcccaaggtgggaaacagccacctgcctaaatgttactgaagtcagcactcaaacccagggctccagattccccatgcaggaccctgcccagcagaccacagtgctccttacagaaggcttcttggatacccaggcagcagcactccctaactgtccctctgtccccctagctcttggggcacatccccatttatcttgtggaattacatccacctctttacacttgcttgctgggctacactgagaggtccttcttggggctgcctttaattcaccgttgtgtccccatgacctgacacaggccagagcatgggaatgtcatggcacatatgagtcacacgaacacacgcaaacgcgagtgcatgccatatgccagttttggcaaagcaccttctgccatgctctaagctgttggaacaggtgagctcacactgcccctggactgagttggctcattgttctgtctgctcagaattgacttccttgtggcatcaccgatgacatcctttcaaagtcatttcctttcatgaacacggttgctttccaatagccctcagtcactctcaactcttggaaggcaccatttggaaacaggcgaataagcacagagccccccatacgtgtggacagtggcgatgacagggaaattgaagtgccgtgggaaagcattgggagttcttaagcaacgagattttgctgttccctgaagaccatggtggctagtggggctgtgtactggggctctgcagtgaaaccactgatggatatttctggttctggtagtcatgaatacccatgggcgaggtcctgtggacttggtgttgtgagaggcatctcacccaaagcggggcgtgggggccatgttgtagtaaggatccagaaggggtctgttcattggtagcacattacctttggagcacagcctggctgctgtgctatctggccccgtaagtgtacaaatgccattttcccagccaggggagcagtggaagagctatggaaaggctgtattgtgtatacagtgcgaagtaggcacgtcagcctgtttcagtgagctgtcggacacttcccaaagcaaaaccaccagctctgggcaaggcttgctaggttaagctgttgggaagccatgacagtcttctcattgcccaatggccgtgtgcttcagaggagggaagccgtgacagtcttctcattgaccaatggccgtgtgcttcagaggagggaagccatgacagtcttctcattgaccaatggccgtgtgcttcagaggagggaagccatgacagtcttctcattgcccaatggccgtgtgcttcagaggagggaagccatgacagtcttctcattgcccaatggccgtgtgcttcagaggagggaagccatgacagtcttctcattgcccaatggccgtgtgcttcagaggagggaagccatgacagtcttctcattgcccaatggccgtgtgcttcagaggagggaagccatgacagtcttctcattgcacaatggccgtgtgcttcagaggagggaagccatgacagtcttctcattgcccaatggccgtgtgcttcagaggagggaagccatgacagtcttctcattgcccaatggccgtgtgcttcagaggagggaagccatgacagtcttctcattgcccaatggccgtgtgcttcagaggagggaagccatgacagtcttctcattgaccaatggccgtgtgcttcagaggagggaagccatgacagtcttctcattgaccaatggccgtgtgcttcataggagggaagccatgacagtcttctcattgaccaatggccgtgtgcttcataggagggaagccatgacagtcttctcattgcccaatggccgtgtgcttcagaggagggaagccatgacagtcttctcattgaccaatggccgtgtgcttcagaggagtgggaaggtgacagccacataacattttgacaggagacattcatagcttcctgggcctggcattagatcagcataaaggtgcctggcagctctgccaagccatcagctaataaaggctctgctccccttggggagacgcctacttgactttaggggagtgtccaggccaaaacgataaccttgataagccaacaaactccagaatccagatggctaggtttatggtggagaatattgtcaataccagctgagaaagacaccagaagaaggattcccacaccctttttagatacctgcctttgtattggtctacctttcactgtgtaacagctatggtaggaacagaggctgtgtggaggggcctatgagcagcaggggctgggtcgggtgttgtggaggccacactgtggttttggagggacaagagttaccagggagccaccgggacctctcctgcagtttaaagtggatgtggatagagagcagctgtgttcctgggatcgctggctagccagccaccctgcaggggcagagcaaacaggctgttagctcttgaactgccaggcacactgggggtccttggcagggtgtggagcatgaaggccctcttcctctccagggcctggaggacagcatcctctgcctgcccgccagggtcccagcccaaaccagcatcttccgagcccacttctctctccagaggcttcttcatcttcccagttccccaggatacaaagccgccttcctctttcctctcctgtgcccttccacagttatcagtgcctgcgttcagtcagtcaagtcgtatgggctgtcctcttcgcttcttcgcttggacttctcactccttccctcctctcccctcacctctctccgcctggactcgcagccaccttgctgccctgccttccagccccgttcccacgcaacctgtgtaatgcagccaagttcatatttctgcagccgactgtgtcactcccttgttcaaaagctttgaatgtgtctccatgggtacagaataaagcctgaacatctctcagtatttcaggcatctccaacctgtcccagccaatagcttgaaccttatcactccctactgccctgccgcaaagccagactgcatcttgttttccagaaacgcctgctgctgtcctgtttctgcacctttacccatctcccatccctctgcctacagcacctgtttcctcccctgctcctccgtggcctcctagcccaggtcgaagagcacgtcttggctcaggcctcccagagcccccatctcaggacaggcactgtcagcactcaaccctcacctacccaccagtcggtgggggtggcccagccgtcttgttatatagaaagctcttgggaggcagcagcgtgcattggtaacttcttattcactctcccactcagtatgtagggcaatgatttctatttcacagacttcccccaaaaacacataatgaattgaattgaattctcttcggatcagagaattaaggtctgatagccctatattcatacctagttggccaaataccatttttccagtcttagccatgctcatggtagcccccagagagtgtattgtggttgacagaatgggcagaaatgatttggcgttgagaaagtgggccgagaggaaagtttggaaggagttagaattatatagtcccaggagaagagaaagccgggagtcgacagaacagggacaaagctgcctcatgcccacatactccccgtaggaggggtcattgtttcactgtatggcgtcaacttttagattctgagtttggatcatggatacatttcagccctctggggctctcctgggctggggggcagaggaaggacaggggcagaggcatgagaggggatgtctttttcttgcatggaaggtgaagaaggcctggatggtctcctttcatcttgcccaagatcatctcacatgggtattgtttgccccattttgcagatgggaaaagtgaggctcggaaaagttaacgtattcacattgttcagcttgtaagttgcacagttatgtggccgttgctccctccgtaccatgctggtctctaccacaagccccctcacgaatgcccttctcttccaaccaggggaaccagaagtgggccctccagtcccccagccggaacagcctgtgaattttccttggttgttgcatttatcgcttcagcctaatatgcaaagcaggtggacggagaaaggaggaaaagagcggagatggggcgggagggcgggggcggtggtgctggtagtagggcatgggtttgatttttttttaagttgaactttatgattctgagaactctgtttgaagcatggaaagaagttatggcattatcttgctcacggaaagaaaaagcgaactgaggtcaagcgccatccctttggaatggtttaagaggcagttttgtttggaaggagatgtgtcaattccgtgacctatccgatttccttcagttcagggttccttgggactggcttagaggagggtgttgatcagccacaatgctctggggatgggagttctagcttaccactttcctgccttggcaagtacggtgtgaggaatgtcatggaaccgcctctgatgattctgggctgtgcagtgctacagcgtcatcacttctgagtctctgatcccaggaacctcagcactatggggccccgggggggatcactgacacgtggtgtctttggagaagtcctgtcacctacctaaagccacgggtcgctttaagaatggatctgcctgtgtccacttggccttgcccagagtaggcactcagtaaagagctgatttgactttaatttggtgctttgcaaatcgatctatacacttgggcgttaaagtagctcagcagagggatggaaggggagatgaatcatcctgagtttccctttgatccattttctccaataaccagtgctcagccccgaaacagagctgcctacactacagttacccttgcctccctcacccactccacgcttccttctctgtaaacagtgggggtaagaagctcatgccgcatcaagatatcttaactgtcagaggctatcagtggaggggagagtgacagctccagcctttctcactacttgctgatgtggaaaattatcatccagtaatggagggagattagccacgtattgtatttccatcgtcgggtgcatggcatgggaggatgatttatagaactggaaccctgaagctagtggaaaggtcacagaaagtggaatcattggcctcaacacagtggctagtgtctgagggaacctcctagagccacatgcatgccaggccatcctgagtgcttgagagagacatgggcacattaacacacatttaagtcccaacagggcacccagaatactaagataaatagacaccgtctctgtcctaaggggaattacagcctagttcaggagacagatgcaccaacagacaggtgacagtgatgaattgcagtcatgaaccaggggctggagaaacacagaagacagagagcagagtttggaagagggtgggagggactgcctgccccaagaaggattcatgaaggtgccatgtcagtcagggttggtggaccattgtaataagcagcccccaaatgaaatctcagttgcttagtacagtaaaggttacttttcaccccacggtggagtgtgagctggggatgggagggaggagagttccaccacaccggtcttcaggccccaaggctgcaccccttttgtggctttgccacccccggggcctcacagtctcccctgtctgctctgcatcgggccagcagaagagggagcagagggcctgctggaggcttcagcagccaggcctgggagtgtgggcattgctcgcgacacaccatcggccggaacacagctcccacttccgcctgacttccaggggactggcgaagagcagctaactaagtgctcgggggcagaaggactggggctgggtgggcacaggacagtgttcctgctgcagtttggcagcaggtcacacggccaaaagatcgcaaccggaccttctaagctgagggggctacatttgcaaagttgtagaagcaaaataatttttaaaagaaggaaaggaaatggaattgcacatgtttcatggtgatttgagttcagggtgcacaggggagaagccaaaaagaaagatcaggacagaaagactgggacctggtcccaaagggcctcggagtgggactctatcctgtggttaaggaggagccaccgaagagatttaagcagagggatgacaaggtaccagtttaccatcgaaaggtcactgtgcagccgagtgtggacaatgggctggaaggagagagaagctggaggcggagtgggggtcagtcagaggctgataaggcctgagtgggagtggacaggcggggaaggattggaaagagcctgcatccactgggatagggtcctaagggctggcaggccctgaacacctatcctggaggctccaggataaacaccttgtgcttttcagcctcaggaatgatggaggaggttgtgcagtgccatgcccctctgaggggctcttcctgggagttggtttgtcctgcctgctccttggtgggatccctgccatgaccctctgccccttggcattccaaggcctgtttaatacccatgaccataaacacacccacaagcagtccccttaccctaaaaggtgccacatggagaattccaagcaactcagcctattaaatccttgcctgcatgattaaatgcctcctggggaaaaagtcgagtaacaaccccaaacataggctttgatggctccatccttcaggattacttcaccaaatggaaatactcatgcctctggtgacagctgcagtgtttccagaagagatttctaccctcatataataggagagactttgtcctcttaaataactatgatacctgctgtaagtactgaactgttaatcaccgtgatcactttgtgtcgatgccacactgctagagggacagaactgaagccttgccagaaacaacagagaatctgctcaaagagttgcctaatgaaaagggtggtctgttggggagatagatggaattcttcaaaatagaaggcaattggcagcgttaggctggggtgagggtcaggagaagaggggcagctggggagagaagggctggctcatttatgtcttactttctttctatatcctggtaccaggtgctggattccttatttagccatgtggttagctccatcgccatccaaaaattacggaattctaaaaccctggggcataaagggggctccaggtccctgagtctgtcctcattccctgggcttaatcatgcatcccccgaaccacaccctaccccatgtgggggctgttggcccaaagacaagtgtctgtgctgctattccagggccttgtcacatcacactggagtgaccacctcccagctgacagtgctcccggattccgtttcttttagagatatgagcaggtttcaacactgtctctggaaaaatcacaggacatgctcaaaggtagcatcatgggaacagggcaagggccttccacaacagaacaggaagttgtattcatttccaaacacctggctttgagccgaaacttgcactttactgataaggccataaactctcctcctcctgcacccagtttgattcaccagcagggcccacacatgtggtgccatccagagtcatccctcctcaaaggaaatgatgggcaagaaacgtgtttgcacaagagtctctaaacacagcccatgaatgaatggtctccggtgaaggtagactggagtgatagagtagcatgttcacttctacatggcgctgcagagagcctaagaagagaatgaataaagaaaagtgtagccatttactcagtcataaaaatacacgtccattgcaatttagaattaatacagattagttcctccgactgaagaaaagtaaccccagcaaagatctgcagggccgagccactggacagaagagctttgataagagaaatttaaaggtttatgctttctaaatagatacatttgaattttgataaaagagaaatttaaaggtttatcctttctgaatatatatatttgaattttgataaagttattcagtgttttgttttattctacaagaaagtaaggatattaagacattttaaaaatgtctgggcagaggagcccttgctgttccctaaatcatgttctaaaaccttatttgctaagcctgagtctggttttgactaacatggcccaagtcttactctaagaacttcaatagtgccttgtgtgcaggatcacagtgtataaagattagaggtcaagcgaagacaaaccgcaggccagcactgttaaagaatgattacaactgtgctgggacttgtttgtgtcttttgcttgaagtaatagactagatctactctcaacaacttactgatgaagttgaaaagccttaattatttgcttgacaggctagctttaaaggaaaaagcctttgtttaccttctcaatttcaagcttcaaatcagcctgtccaaccattgtatctcatgtccatgactcatgagatatgataatggtgtccactgtcagttattatgttaacaaaattatctgaaaataaccaaatgcacacctactaacacatgcacacacaccaaacacaggagcaagaagaaattaaggactcctttcttgtcaggaatattcagaattagagtctcaatgaatttactaatattcgctaaggtcagctgggtccagctttgagtaaaaagcttggcatgatgcttgctatgcctggcagaggcagagaaaaagatccctgctgtccccacaggggagagcatctgcttgacatgaaaaagtaatgtcagtggtgggtcccagccccttggaccacttctgcattgactaggaagctaaggggtcagttgctaaccatcaggccgagcatcctaggttttcatcaagaagatcccaagcttcaataaaaactgcagagtttcttcttgtacctcttagatggtatacaatcatgtccatgaattataatttccataatcccttagtaaactaattctattaatctattaagtcctaccccttgattagatgagttgagaatacagcaatctgggatgaatgaccctcatgttcctctcccaacaggatgccagagtttttagtctgaacaattgtcgtgtgctatacaggaactaacaggagccagagaaaagcaggcagccagacttcacggccccacttgatagccagtctgcagttggcctctcccagtttccttgcttgtaaaatgacgggggttaggtcagtaaaagccccttccagctttggaatttgtttctgtagttctcagttgacacacgttagctttagctccaggagcctgggccaaacctgatcatttcagtccatcagaccccagaggaattcagttgattctagcttcttaagtcctcagactcctggaattgcacttttcctcctgcaggattgcctgcaccctgaaagccagcccgttcttccaacgatcctctgcacacttgtgcacaccctgatctctgcacggaaagcccagccccaccatctgccttccgaactgccatgttaccaggccaggcttgccctacccatcatgccatgtgccaatcacggagacacaagttttgcagcggagaaagcgtttgttcacaaggcagccaagcaaggagatggaagagcaggtctcagatccacttccccaaagatggggttttagggatatttatgggatagaggagcaaggtccaaggcatggggaaaggtgattgggggtaaggaaaagtgaggccgtcggttatctgcgcaagtatagtcaagcttcacagctcttcctgggattcaagttcacaaaatggcatcgttagcgtgatctgaggatggatgtttgggccctctgatgccaaaaggtcgcccattggacactcacgcaggcccagttggaggattagtggtctgagctagcttgaactggacaagagctgaccccaagctcttgaaaaatgacttaagcaaccattatcatggtgacttatacatcagagatgttatctgtaaggaggcttgtagaagtttagttacatattccttaactacatgacttttagctgcatatgttttaaaatcaactagaaaccagtgaggcaagttaggtttggtgacctcattaggttagcccttggtttcaccaccccaccttcaaagccccatcaaccatcccttccttttctgccttttctatcctcaccacctcttctccccagcagggtcttacccgctccttcatgctcccagaaaccccattccacagctgcatcatagtacttattgtatgtgatctgtagtgtctccctgtctgctgtattcattgcattttatctgtggcattcatctatctgataccgtctgctgggtagtacatcttgaatgtggggacttttgtattaccagaatcccatacagatcctggtgcataggcaatcaatgaatattggttggaaaagggtttggaaattgggggataaaagtagggtcttggcttggaagtccttggaattctgcctctgggaatggatcacttaggcctgctttgtcactttgtcagatctaaaacgaggttgggccagatctgatccagcagaggatatgtaattaaccaggcacataaattaatttttaatcttccattccttgcctgtcaacatttctttttcacttctcaaggaggacatgattatcccatgatgtttttcttcatgtactaatttctcctcctctttcttcttcaaacctgtccacggaagtgtcagaaatacttctcattttatcctttctcaggaaggccagctagccagctaagaatagcagtcaggaaatggttaagagaataccaagaataaattctgagttgcttctttacaactagaaagctgaatacatttaaggcttgaaaggtcaactcccttcaaagggggcagaggtttgatttcgtccattatgtggtcttcagcacaatgctcatttcattcactggctgcaatggagatttatggagtaaatgttatcacaagctgagacttaatgagaactcagctgtatctcctggatgtagtggaaagcaaccattttggtaataaatagagaacagcatctaatttgtaaattcctttttccgttgctaagtttaatcagatcagtgaaactgaagggaattgttgatgaccaaaaattattttccatgccttaatctggccaggaaacattactcctaatggaaatggcctgttgctctggcgatggaaggggatgacatttgtcattagactaacccaattgttgcatattgataaatatgtttaggccaaaatctatttaaaacccaatagaagctgaggccccatgttgccctggtactggtgttactggttcctagaagtaaaaactctttccagttaaactacagagatctgtagcagtggccatcctaaagatttcttcttgccctcagtgatcatccagagcaaggccagaaggaccatgatggagcccaaattgtggtcataagtgaccttttctgaatggcagagagtgggttcagagaacagaacacaatctctggcagggccttggcttactttagggttaaaacaaattcaagggggcacaaaagggagttgaatgcagctctcttttttccagcggtgcttcagtttttttcgtgatgaatcataaagatcatttccaggatagggaccatgccatgggtaagtgaccgttaacacgcagtaggaactttatgaatactgcatgacgagaatgacagcaatgaggaacacatctgagaagctgatggccccagagggaacacggctaactgtgacatctttagggggtggccctgagaatgctgtatcccttccagtaagagtaccgcctccaggcgacctttagacgcacagcaaggggtcccgaggacattcttctcttggcctgcacttgcttttatattcatgtgcttttgtatacatgcccagtgtccaggcatcctacacactcagagctctaatactgaatattaggaacgacagctactgctcatcaagcacctccttttgcccatattatctttgccctcacttcacattttcagatgagaaaagtgaggttcagatcattggcctgaggccagttcgctaacaggaggtttacccaggcttacacccaggcacgccccatctgactcgaaagccttccctctttctcttttgtcagagaggcaagcacatggtaaccccccagaatcatgagcctggtgataggagaagtggagtggaaagaagccctagaaagggagtatggagacctggttcctagtcccagctctgatactaactggccctgtaacctaaacaaccctttcctctctgggcctcaatttcctcataggtaaaagtaatacccaaaggatctctaattgtctgttaatctttctgcattccaatccccttgaagccccatccagccctgtctttctcttggagtttcacattccagaacaagtctgtggctaagctgaggagaggatgccctcattttgcaaagagacgcttctcccatcttggccaggcagcagaggtcacaagagaggaagtgtccactgcataaggactctggacagcttctctgccagcacgcatccagcagctgactctttcctcggggcccacgctctcctgcccttttcccagagccactaccctgacaatgtctgtctaccttgagagcactgaacagtagaacctcagtgccgggaggtgtcctgaggttctctccttctctcccgtcatccccacctatgtgtgaaactcctctacaacaccttcactacggagtctctccaccctgcttcttacacactctccgtgtaggaacttaccagtcacaaaaaacccttccatctttgtgcaagcctcagctgctggaaggtcttccagctgacacctgcagctattgagtgacagtggaaagacagtgtcctgggtgcagtggcatcctcccgatggtgtggtgaattatcctggcatggttaattactcacactaattgcttttctgtcactgcgctccctcctgcctcctatgtttccatgaggggttgtgcttttgagatcttttcccacctcttctccctttgtcctcccagtgactctgagggaagcgctgagctgctacaccatgttccttctcaaccaaggagccagcactgagcagagaggagctcttgcctcttgcctctggcccaggcaggcatcagggatctctctgtctctctctgtctgcctctctccctcccacccctcgacacagtccttccttcctctctgacatctgtgcttggtcactcccatctgcaagaaggcccgctcccccacagtattattgagatagtaacaggccactgtctcctctctgctttccccaaatcaggcacatcccaacttcaccatccaggtagttgttactcttgtaatgtaagcagcaaaagcgatagagcagcttgaagctgcccagggcccatgttctggctggacaggcccaccgatgcctgtgttcacacagcccacactgcccgacactcccactcctcaccccaagagccttcctgtgttccatccaccaggaccaggactccatccccaaatcagaacctctgtgtcctttccttccttccaggtttcctgggccactgagcctgcagcatgaatcctcctagaatttaagactcagaaggagacaggtcacggagaggtagcagtgtaccccaggcagtcgggcccaggtgagcccaaggtcaggcctcacatttcaagtcgatttcaggatcattaacattcccacttcctgtcatgcccccaggccttttgcttgttgaagacagtggtccctgttctctggatttcaaaaaccatttctctcttctgaaggaagaacaatcagcgtccccaacaagcccagctctcctgagaaattacagaatagttctaagattcgggcaaagagggaggagggatgaagggtgaagaaggcctttgattcagactcagccttgagaggaaggatctggagggagaggctgttcagtggaataatgagagtgacagaggcaggcgttcatccccgtctgttctttttgcacttttggtttggggtcggtttctccttcaatgtgcttggcttagagctgccccagctgctgtgggcatgaaaaccactgctcaccagtctccacatcttggcccttacccaaaataacccaggagggaggaaggagctcatgggtgggtggctggataaatggctccagaataatggatcaaacattgaatgagtgaaggagtacacaccccgtcccttggccccaagatgctcattcatacccctctctgagcgtgaaggagaaacagcaaaagctgaatttggggtgtgtgccccagtgccagccagtctttccagggtgcttccgatgcctccagtggaagtccccagccatgttccctccctggggcattcccatctgccctcccagggaaggctgcttggtgcagcagaggtgtgctctctgggagcttcggtggagaggaaaggacaggggagtcaggatacgagggctggtggagtctgccaggtggggctagggcagcctcgctcttccttgtcccaggagcacatgtcaaaagcgccagggctggggaagcagcagggagcagaggctggagaaggcctgcgtccctgtcccggttctgctctcggcagcctcagttttctcatctccacctgtggctggagacgccttccccagtagtctccccaggttgttgggagcatgaaatgaggtgctgtcatgtgagcgcttgaacagccacactgctggactctcctaatgaacgagcaaagaaccatatgtgtcagcacaccaagctacatggcacaaatagtaaatgcctcagggaaaaggaccattctgggatgccacgtaggtcaaggaggcttcatggagatggtcggagttggagggtaggtaggaaggcttttgtgcatgtgggggagtggtggggatggaattccaagagtggggcagcagggcaaagacccagacacaggcgcacagctcccagcaagcgccctggatgcattaagccctccatcagtggtgtcaaagcaagaggaaccgtgtgtggcatattctggaggcagagagtaggactgagtgcatggatcagagggcgaatgctggaaagggaaggtgtagttagatgggtagagtgaaagcggattgccaagggccctgggagccaggacaagggtcccgtgtgctgagtgatagtgatgtgacatggtgaagtccctgctgagaaagactcctccagaagatgagagaattacgtgtgggcttcaagcccctctctctctgtgccgagagtccccttacaaccaacaacttaactgtttcatccaatcaacccactcctttcttgtagagcttaatttttttttccaaggcaaagaaatcttagagatctcctctcaaccttcacctcccccacccctgcagcaaatgcttatccaggctttgcctggaaacttctactaatgagcaagtcctcatctctccagatagccaggccatttgggaaatgtttcatccattagggcacgatcttcccctgcagttctccttctttagtgcagtgccctctaaaactactctgggcaggtgctgtcttcctcctgtggaaaaaaacttcatatgttggaaggtggtggcgaggtctcttaggttctccttatctaaattaaacctttccattttttcttctactgttctctataagtgacacaacatgacttactggcccttccccatcaaagaactctattattgccccctttagacatgatcctgagcactgaacctctatcctaagggggcctgcctgatacatgggagagggaagccctgcctccctgggtctttgcctgtagcagtgagcctagaaatgcatgaagccgcaggacctctcacaaaagatgtgggcaattaaagcagctagagccgggcacggtggctcacgcctatcatcccagcactttgggaggccgaggcgggcagatcacgaggtcaggagattgagaccatcctggctaacacagtgaaaccccatccctactaaaaatacaaaaaattagccaggcatggtgctgggcgcctatagtcccagctacttgggaggctgaggcaggagaatgacatgaacctggggagtggagcttgcagtgagctgagatcgcaccactgcactccagcctggacaacagagtgaggccctgtctcaaaaaaagaaaaagaaaaagcagccagaggcccggcatggtggctcccgcctgcaatcccagcactttgggagggcgaggtgggatgatcgcttgatcccaggacttcaagaccagtctgggcaatgtagtgaaaccccatctctattaaaaaaaaaaaacaaaataattagctgggtgtggttgtgtgggcctgtaatcctagctacttgggaggctgaggcaggagggtcacttgaacccgggagttttaggctgctgcaagctgtgatcacaccagtgcactccagcctgggtgacagagcaagaccctgtctaaaaaaaaaaaaaaaaaaaaaaaaaaaaacctaaaactaaaacaacacataaagtagccagatggaccaaagactctgtctgccccagggcaagaaagaggaaaacaaactgcaagcatccagcaggcagagttgggagaagaattaaagcaaaggacacgctacatagcagggcaagctgatcgatattctgacagctgcccataaactcattcatgaaattatggggctgaagagacaccatggggttggagttaaaatgactcacttcacataaatgtcatcaatggcggcagcctagaaatttaaggcagcaatttacttgcctgctggaagggaagacacaaatgagacctgtctgaggaagtcttgctccatactcaaggcggctttccctctgtggctgttcacggccttcaaggtagtgctgggcccctgtagatcctccttgcaggaaatctgacctgctcttcagcagcagaaagcagtgaagcaggaaagacggggccccagagaagagagaaaatgagaacaaatcgtgagctctgcatagctttgtgaacggcaaagaacagggtgcaaacgtcaaaactcatccatagtaaaactctgacttccgtacaggagagggagcctggggcctgtgtccatccttgatacttttctgaccaagggtgggctcctggcctctccgtgatgtgcatcaatggtgagtgagaaagggaggcagcactgatggtggaaagaggttcaaaactctaccactatctgcctctgcgactctggacaagctgatgaccctctctggaccttaacattctcacctatacaatgaagggctaggtggggcacagtagctcatgcctgtaatcccaacattttggaaggctgaggtgggaagattgcttgaggccaggagttcgagaccaacctgggcaacatagtgagaccttgtctctacaaaaaatttaaaaattagccatgcatggtggtgcatgcctgtggtcccagctactctcaaggttgtggtgggaggatcacttgagactgggagctggaggctgcggtgagccaagatcatgtcactacactccagcctgggcaacagagtgaaactctgtttcagaaaaaataaaaataaaaaatcaaatgaagggctggcctacaatcctacagaccccttctgactgtgatgatgtcatgattaagatctccatttcacactggggaaaccgagccacagaagagtgaggtcacatagctccaagtggcagagccaggatccaaactcaggcccctggcccccaagcccatgctcctaaccacgctgcctgctgactgcttccttctgcccagaggagccggcagggaggccctgggcagggtcataaaataagtggcttctccccaggaccaccacctgcacccactgccctcctcctccacttagtgatgccagcacatcctcagggctctcttacccttgctctcccatgacagataggaaaaggctttataaattcatcaatagacattctagctaagaggatggacttggcatcagatctacccgggttcaaatcctgaatcttattggcgcttgcttggagtaaacgactgaattttctaagcctcaattttctcatccaaaaaatggggacatctaatgcctccctcatagggttacctcagttaatgtatgtaaaattcatggaagagtagctggcatatagtgagtgattgagagactgagctttgttgttaatatgaagatagaaatggctgatgttgctattgcacactctgggagacaaggccttaaaatcaaggaatggccattaggtgtcatggaaccgggttggaggaggattgggggtgcaaatcatactctatccctttccaatcataccacgtgggtgaccatctggcatgtggcacttagcacttaaaaggacaccactaatgtccttttagtagtgagaactgggtttccaaaggagtgctctagagaaagaccaccacactccatgtctagaagatccctgtcccatccctaatggttgcaggcaagctgtgttttccccttggagtgtctcgccctcctgtgtggtcagatagcctgttttccccatagtccccgagggtctgagcatgtcccaggctgccctgccatctctagtgaaggtggggtgggggtgggagagggagtgtgccaaagttcaagagtttgttgggtgcagctaaacttactgcccctgccccctcccggccccatccacctccccgccaacccggcagcaataaccaaggcagcctgatagactccgtggtgccctaatggtggagagagattttctgcttgggagcacaggatgtttatggcctgctgagatcacagtaaccctggctttcttctttggattatggctgcagatcaagggcaggcatttatgcctcctcccagtttatagcagtgatcataattatggtgatggcagagcgcacttctattgtgcctttttaataaggccactttgtttggcttcttaatatttaatcctgttttatatttactttctgatggcttaaaatcaaccaggctttaattgcttatgcagaggaagccaagctgggcctgggctggcaggaagttgttgagaaggttctggaagctgatggcacctttctctgtgacctttccacccaggcaggctgctgtggcctgggaactgtgtttctttttctcttctctttttctctcatccactctttcctcttattctacaaccttcttttctcttttgccattcctttcctttcttttccttagaagagatcctcagttcaccctccggttcaatttatccatgtaagagaccagagttgtactgtgacctgccaaagctttggagctacttagggcaaggccaaggcgaggactgtctttgttgtttttcctggactcacagtattagagactcctaagactccaaactgggcaaacacatatgaagagttccttcatctatccacttgacaatacatatggccacgtgcttgatctatccaacggtagaaaagtcataaggaataactttccaagttattgttttctgaaagagaaaattaaatcagatgaaacatgccgtgccacagttcctcaattcctgggaagtaacacagcccagttgctcaggtctattctgcggtggggctggagcaaccctgctacaggcccctgcaccaccagctctcagcagcagtccagcctgcaaatgtgcatttcagcgacgtcgcctgatggggctgaaaaaggcctggactcaagacctgtcattctctgccatttactagctctccccttgggcacctaacttcagcctttggggactacactttcttttgtcagtggggataataatatctaccttgcctgtgccgtaggggtatgtcggtcagtgtccccatggaaacagtaggtactcttaaactaggtgacttgaggagggcttcataaagatgcaggcagggtttaaggacttaaggagggcttcataaagatgcaggcagggtttaaggacttaaggagggcttcataaagatgcaggcagggtttaaggacttaaggagggcttcataaagatgcaggcagggtttaaggacttaaggagggcttcataaagatgcaggcagggtttaaggacttaaggagggcttcataaagatgcaggcagggtttaaggacttaaggagggcttcataaagatgcaggcagggtttaaggacttaaggagggcttcataaagatgcaggcagggtttaaggacttaaggagggtttcataaagatgcaggcagggtttaaggacttaaggagggcttcataaagatgcaggcagggtttaaggacttaaggagggcttcataaagatgcaggcagggtttaaggacttaaggagggtttcataaagatgcaggcagggtttaaggacttaaggagggtttcataaagatgcaggcagggtttaaggacttaaggagggcttcataaagatgcaggcagggtttaaggacttaaggagggtttcataaagatgcaggcagggtttaaggacttaaggagggcttcataaagatgcaggcagggtttaaggacttaaggagggtttcataaagatgcaggcagggtttaaggaagccagcaagtacagtaccccagggtagcagctgtgtggatctgttaccggtaaaggctggaggaacaaagtgaggggcagcctcagagtcagagagcagctatgtggagagggccatggggcagacatgtggccttgggcagcaagaagcagccagtctacaccaaccctgtgtgctgcagttggggagcgaacgccccacctctctctcctcgggtccacccacggacgtcctgctagtgctgcccatgggccggcccaagcaggaagcaaggtcagcttcctggagcaccaggcctggggagagggaaggagagtgggtctgaggacagactctcaactgtccggcacctaggagtccccttaaaaccccatgatgatatgaagtgttattctagggagagggtgaaaccaaaacacagatccaggtttttacttaaaattctcaccgactccggagtcacaggagctcagaagaggagactcggtgggcaggagggtggtcctgggagctgccacagatgcgaactgggcctctgagaagggatgaaatttggatagatcaggggtcagctaactttttctagaaagggccagagagtcaatatcaaaggctttgcaggccacacagagcctctaccgaaactcctcccctccactgctgtggtgtgagagcggtgatagacagcacacacagggcacggcagtcccaggaggactgtgctgacaaagacagggcaggctgcagttcgctgacccctggaatacgtgcaggaggtggacaggcactccagggacagggcatgacgtagggccccatgcacgggaaagaccagaggttggtacggagccagcacgttgaaggatggtgaggagggcagcccggtgtggttggagtttctgcaggaagtctcaggacatgagagagaaccgacagtgtcttagtcggccagggctgcccaacagcgtatcacagacccaggagctggaacagcaggagctgattttatcagtctagaggctggaagtctgagatcaaggtgctggcgggcttggttcctcctgagggtcatgagggaaaaggggtcagtccccaggcctctctttggcttgcaggtggctgtcttgtctctgagtcttcacatcgtcttccctctgtacctgtcagtggccacagttgttctgcttataaggatccggtcacactggattcagcccaccctcatgacctcatcttaatctaatgacctctttcaagactctgtctccaaacatggctacgctcagaggtatgcgggggctgggacctcagcatctgaatttccgaggggatataactcaactcacagcagataagatgaagccaaattacagggtgttttagataccagattggagtcaatgaggtaggaaatgaggaatccttttgcttgttaaccgtaagtctgattagtactttgagaaaataaatacaaattatgccgctcatatgcaaaaaatgtaataagatgggcacctggccaagtacatggcaaagtcaattccttagttccatcctggagtgccgggaagcctggacactggatcccagcagactggtgacctggactcagccattggccttgtatgacatcccaccacactggagaagtttgggtggggcaagcagtgctcccgatacccccagccactgcctgggatgtctgggcctgaggcatcaaccctcttcctcccggaggaggcataagattgacagcagctggtgagctctctggccttggataacgagctaccagctaagttccggaatacacactgggcatttttcttagcaaatctcatgagaggccagccactcctgctgacaggcacatcaggacattacaaagctccatccctgggacaaagtcgaagctattttgggtgaccaaaggtttcggaactaggcagattgtttcatctcgccccacatccatccctcattctctcatgtggagctttgctctggtgccactcagtcagtcatgacgcataaaaagctccgagacgggggcctcaggaacaggccggatattctctatgaggatggttctccccatcctcctgccagtctcaggatgggaaggaagggagtcaggatgtggcagggaggaaggaaacgagagtacagcagcgggcaccaaagaggattttgctcattgtttccttcgtggatttattgctgtcaccttagtgccatttttcttttttatcaaaactaaagtggttctgactctcaatcctttgccaaaaccccttctggagtcattttttattcatgaggatgactttggtcatctttggacacatcatgctggcctcatggtggctaaatgagacccaatttctttttaaggagaacatgagtgttcacacgctgacacagcctgcggcagattcactacttggagacttgctttcagcaatacagggaactgtcaagagagccattcgttttacagagagctcacttcctatggggaaagtgaggcttgtgtgctctgacattgcccattttttgttgaccacagctgtaagaagcctggcccgctgatcagtgcagccatactttcaaagcaccacctggtgtttaatggaggattcccaaatttcagcgagtaaaccctcagagggtttgctaacccaaacaccaaggaagggcaatctacacaatggcttagctctagcactcctcccctagcacagctggtgtgcttccagtttcaagagattattccagggagaaaatgactttttataatctccccagtagtcacacaccaaagcaggtcgggggagacactggtgctgtaagacaataactgggcacctctcttgagacatagaaatagtcctactaagtgctgttcaagcaagagtggccaccaagagtacatgtttgtggggttgaggggagaagacattaattaaaggatgtaatcagttgttggcaattcgaccatacaacttgctgtagccattgatgatattactaaaaatgcaatgatgttagccatcttgagctaccagccaagttccagaatacagactggtcattttcttagcaaatctcttgagaggccagccactcctgctggcagatgtttcttgcactttcaaagaaacctcattttcttgtggagtcttctcaccagaagcaagggactggatagcccagagaaacacatttggtccatagcacctggtaagagggaggttagaaaatcggaaaacaagcttcctgtatagctttcttccccagcattctccttcccagatccattcaataaagcatattgtgccttataaaggatgtgctattatgacattgcctgcagatgagcagacaatcaaacttcacttctaaggaagtgaagcaagttggctttagagaaaaggtgccccttagtttccaaccaactcatcatttgaatggccaagggaggggtcaggctttccatctcatccactgaataagtatccagcattcatgattctaaactttcaacaatttggacattcagcttcctagaagttttccttgaggaatcagctttgataccactatgtaatcccttggtaataggaacacaaacaccatttcaccatttgattcctgcaggtgcttatgggataaactatcgcaaattaataggcactaatgtgttcatatattgcttcttccaggtgagacatttttatttcagaaaggaacctttagatatatgcagtgccccaaaagaaagatctgagacttatgtgaaccatccagggagatgatttagttgctcttcagatcattttccatgcaggtgactgccaacttggcccccatgaaagaccagccctggtcaaattcaggttcataaaatgatcatacagttacttctgaaattggacaacataggacacttaggatgtcagagccaaaagctgaataatgcttctgcatggaaggcgtcaatgttctggactctccaccactaagcagggctctcatcccctcagacagccaccacacagatagaaacttggtgactggcagcctacgtccaccccctatatctccagaaagaaagaccattcattatgagagtcccatgttagtgactgtttgagacacctttccctagaagggaaacttgaaccaagtggctcatttcagctcctaactctcagtgctttttgcatgtaggatttctgagaagtgaaaaaaaaaaaaaaacctgccggttatgaagtttctgttccacactttgtaccttaaagatgagtgtgtgagacacagatcttcaggttaaaaataggcatggcccttttctatcactagccagtctccaaaattctccttaccaggcaacatccaaggaagtccattgactataatctgtgttctaggataagaggatgaaatatagaaaaacctaagatttgggttgcccctcccctcatgcctttcctggaagtgatggtgcagcccacaagttcagcagggcacatgtttccttctgtgagtggtgaccaacttcccacctgcatttgctgccactcattaatattaggttggtgcaaaagaaattgtggtttcagactgtgaattttaaatcattataactaggctcaaacacatctttattaatcaaaagaggaaccattacaatcaacacatttttgccaacaagaaataagatttttattcctattatgtaaaactccgtgcttccagattcagcaaactctcggaaagcattttctgcatcctgctggttgtgaaagcattttccctgcaaaaagtcgagatgcttgaagaagtggtagttggttggcgagaggtcgggtgaatatgggcagatgaggcaaaactttgtagcccaattcgttcaacttttgaagcattggttgtgcgacatgcagtcctgcattgttgtggaaaagaattgagccctttctgttggccaatgccagctgcaggcattgcagtttttggtgcatctcattgatttgctgagcatacttcttagatgtaatggtttcgctgggattcagaaagctgtagtgaatcatactaacagaccactaaacagtgatcatgaccttttttggtgtaagtttggctttgggaagtgctttggagcttcttctccatccaacccctgagctggtcgttgctggttgttacacaaaatccacttttcctcacacatcacaatttgattgagaaatagttcattgttgttgagtacaataagagaaggtgacacttcaaaacaatgatttttttttttttttttgctcagctcatgaggcacccacttatcaagctttttcacctttccaataagcttcaaatgcctaacaaccatagaatggttgacattgagttattcggcaaattctcttgtagttgtaagaggatcggctttgatggtggctctcaattggtcatcgtcaacttcccatggcctgccattatgctcctcatcttcttcattatgctcctcatcttctttgcaaaaccttttgaaccaccactgtgccgtacgttcgttagcaattcctgggccaaatgagctgttgatgttgcaagttgtctccactgctttatgacccaaatcgctcgaatttgctctttaacatcctttccatagtctaaaataaacataaaataaatagcaagtaatacatcattaacaaaaaaataaagtgagaaatgcccattaaaatgatgtataacataaccaaatttatttaagaatgtatttcaataccaaatggcaaattccaacaatgcaaaaaacacaattccttttgcaccaacctaacttgtgattgtgccttacttgcctctcattcccagcaccctgcatagtgacctcgcagaggcacagctcatgccagttctttcagatgaaatgggaaaactctatctgaacagttagctaaagcacttgacatccagaactccaagtccatacataacttcccgttccccatgcaatgattagtgtcttcatgctctccagtgcagtggctggtgtcttcacatgcttccatgtagtagctggaatcttcacattctcccgtgcagtggctggtgtcttcacactcttccgtgcagtagctggtatcttcacactcttctgtgcagtggctggtgtcttcctgctctcccatgcagtggcttgtgtcttcacactcttccgtgcagtggctggtgtcttcacactcttccatgcagtggctggtgtcttcacacactcctgtgcagttgctggtgtcttcacactattctgtgcagttgctggtgtcttcatactattctgtgcagtagctggtgtcttcacactattctgtgtagtagctggtgtcttcacactattccctgcagtagctggtgtcttcacactattccgtgcagtagctggtgtcttcacactctcctgtgcagttgctggtgtcttcacactattccctgcagtagctgatgtcttcacactattctgtgcagttgctggtgtcttcacactattccctgcagtagctgatgtcttcacacttttctgtgcagtggctggtgtcttcacactcttccgtgcagtagctggggtcttcacattcttccatgcagtggcaggtgtcttcgtgctctcccgtgcagtggctggtgtcttcacgccctcccatgcagtgggtagtgtcttcacactcttctggagcactctcctcttcagctgtagccgagacccagcagagctcacagaattcttcttccttatttacaaacttcctcaaatgaccacccattgacaggcaatttaacaacttattggcccatttaaactgattaaaagcagacacatatatgttttggatgtgagccctaggcctttgatgggtctttgctgaatagaattgaattattgaactgaacaaggagcaagtaggtcgaccagtgggttgtttttctacctgcaggtgactccatccaggtgcaaatagcaaggaagcccttgaatccactacaggtgaaagttttgcattgtggtcccatgtgagggaggagacaagtcacctggctattgggtagggatgaaggggataccagggctacagttagactttagcagtgaccccgcttgagcctgcaaagggcgacagctccctatggaaacaacagggatgagtggcagccccctccttggaagccttctcaaagtcactcattagatatgccagatagcctctctctcctggagtaattccttctctccagggtccatcatttgttttgtgatgttaattcatgtgagttgggagtttggttctattgtgttatgttttcctgtatgttttgatttattgaattttttttgtttattttctgtgataaaaatggatgttctatgtgaaagctgagttccttgtttctttctcttgcccgtggctgactgcgtgtgctctattgatgtcttgttcctggttcttgacactgaccatcttgtctgtgaaaggaggcactccggcgggcatgcttgatcagaagaaagggaagtttgcttggtttagtcactccacagaaacccatggtaatgttcccctgtgctctgtgtgtgtaaatgcgtgtgggtgcataccagactgaatgggaaggtgtctctcttgatggcttgtgccgcagtagttctgtgtgtgtgcatatatgtgtatgtatatatgttgtgtgtgtgtgtgtgtttgtgaagggatggcaacctgtccccctcaaagccactgccttatcattgcttcatatgtgtaaagtcagtgggtgtgacaaacaggcagagctattcctccaggagctcttcctctgggcagtgctggcctagagtaagcacactgtgaatgcacggttggaaccagcacaggcagtgccttgatttagaaggtgctgtcgttatttccagtgcccaggcctgcccctccgattttgtctgtctttccaggcctagcaccaccacctccacagcactgtactcacacataaggctctgggaacgaagtgtcacaaagtcacagaactttttctacgtggcctagcccttcaaacaaggatgtctggagggtagagagctaaaaactaaaaataaaaaataaaaaaaacctttgggctgagatggctggagatagatgggttggaagactgagagtgcttccattttatggcttccttagtgtggtttgagcaaagcccctggcaagctctgaaggtctgagctaaaaccatccctaagggctggtctcaccagcccctccagacttcagactataaagtgagtgtaatgctgtggaattcagtgcccctgtttggctactcactgccctcctgtggtgctcccagagcctagtaggctttaagaagcttgtctgcctagggtgtagagtacagaggtggtcgagactggggcgctcaagatgaacatgctacaggaggtgtgacacttgtgccctggacccagccctacttgaacacaccatatgaccatgggcatcacatcccttctctggcctcactttcctctcctgcggagtgaggaggacgagttagagccagataatttctaaagcctcacccagccctagagttctataaaatgacatctggattttttttaattcaattttattaaaaaggtcagagaggtctctcatacacaacagtcaaacatacggtaagtcgtggactttctgtttgtatcttccatgttcttgaaatgattctcttctcaccaacctggcttgtcttcatctgaaggaaaggaaaccaggaaaaatccacatctatcaacattatccatgcaaccagtaaaagtgtttcttgggctctggcagcctcgcagggacttgtcaccagaggccactccctcaactaacagcagattctgtgtctgctgagggctgatgactttctcagcatatgaggagttctattctggaggaacagcagaaccaggaccaaggatatgatggccactctaaagaataagggttacaaaactaaggaacgcattgtatcatagtaagagagtgttggaaggtggagaaaaattctttgagttaaacttttatttagaagaaaaaataataataataaaagaaatggcttctttcaagccaccaaactgggttctaagccagaaaactcccattgttctggaaattcagcccacagctgccttgggaggaggctggacaagttgaattaaacggcttatatccaagtcagcctgttgacatgggaatgtcagggtggctgaaaggggaaatcgtatccctacaggctgtcttctgaccacaattaaacataattgtgtggactgcacacttccactcctcactccttatgtctgcagggctagcttgaatcttagtgcatggctctggggatggccattcccctcaagccctctgtctcagttgtgctcctgggtgtaaccaactgccggaaagggaaggcctctgtccacccagcagctcatcaaggtagcaagcacgccctttctacaaacaggctggtccctgttcttggagatggagccccttagagatggtgggtgggatgaagtaaggaaaatgatatattttcatgaaagctcctctttctgtggcaagtggtagttgcaaatggaaagcctctacagcttcttccagtccacagagtggagaggagagattcaatggtcagttttttcaggatgtgtcctatgaggtaaaatgctcttattaccagatgtcctcccatacttccattagtttacagtgttcttggcggcaaaacctgcctggacaaccagcagatgtgtccatcaaggggatctgtgcagatcagccagccagcgtgctcagcctctctttctgccaacccgcactgggtcttgcggtgggcgtgttgcaaactactgctcttctgttcccttgtctccccaccctcaatgcctggctctgcttccctttgactcttgcagtgagcatgcccaccagtgagaccgagtccgtcaacaccgaaaacgtggctggaggtgacatcgagggagaaaactgcggggccaggctggcgtgagtaggcacggcgagcccaggggctggggctttttctggagcatgggtggaaaagctgcatctggaaatcacagtgggctggctcatcactaggaagggcagagattagagccggtggcaagaaacaaacctcaggtgggaaccaagatggggagcagagggccctggggtgagggtggccctggccgggggtgagtcttaaaatcaaggctagtcttcaattcatcacttcttcgggggtgctgactcttaggttttgagcctcttttcatcacatctgagaaatatagagggtgtgtgtgtagggggcggccccaaagtctgtttctttcactccagtccctttcgcccctcttcaaagagacagcgaggttagggccctgagtcctgctggccaccctttccattctgataaatgtgacctgggagagaagcagccaggtgagaagatgttctgggagatgactggcatgtgggtccttacctgaagctctctcatcctgccagtaagggaagcagaagtgcagtggagcctgctgttctgttgccttggggtgtcacgactgtaaactcaccctggcctctggaagaactgcaaacagaggctctgagtcagaccagtcccaggtacaatgcatttctgaattgctccacctggggggcggggcagggcggcatctcccttccctcctcgtctgtggaatgatggagagcctgggcaagcgcagccctttcacaacgctgagctgtggaagagtctaaacacagcaatgccggccttgagcgtggcctgggagcccatgttggggagggagaatgaggctgacggcagagcagctctcacagccgctgtttccagggagcgtggagcttcagtatcactcactctgacactggcaccagggagtctgcactgcagatttctcagcattgtcgggaagcaattattgtcaaaatgttgttaaaatacgatgctaattacatttttaagcagcagtgcaaacctcttcttttggaatcatacaaaacaagcacttgagtttctggaagtaggtcccaaacagcaactctagggaaaggcctataggaaggcttcaaagtctgtcagttctaggcctttctgttgtcttgccaccaagacgaggcttagagagatgatcaaaggccctgcaactctggctgttgggcaggcccaagtcgcataccaggagggactagggagctggcaccaggaagtcacttgatagtacatttcaggagagcatgaggctctgttaggaaggaaacatgatattcccccacggatggagcctggcagtctccagtggatctgtcgtttgctcagagcacatgctctgcagcctggagagctctgcagaaatggtccccgttatccccatgtttagccacattcgtactctgtgcatacagaacgctgagtcacagtgccagaattataatatgccccgaataaaatgtggtctttccccatctccctacctcccaccccgccccagacaatgatgagccaagactgccagcattcctggcgggagaagcagcatgggaactgagattgcgtgtgatggtctgaggggaagtgagtgaccgggatctttaaagctaagggttaaaagtctcatgtaatgagattaggtcacgatgaggactgctgtgtagtaaggaggcctggatgaagacggttcctgttgggggaagggaggaaggaactacggcatgttacttcatggcagcaggggcaggcgggtgcaggtaatgaagaggaaggagccgtcacagtcagggaagaggataatgaggcagaagtgaaatctgaagcaggagcccagttggagtgacctgcgggtgtcatggagaccacgagatacggaggcccgaaactcagccctgaacaagggtggacacacatgtttgaggttgttgggatgaaaactaccaatgaggtgataggacgggttgttcagagtgaagtggaaaacaagaccaagggctgaatcttgggaaatggacacacagaagaataagaccaagcaagcaaaatagacaaaggaatgttaagagaacaggcagcagcgccagcctggaagccgcgggaggaggaatttcaggacagagctgtttatccatgcattcgttcaacagtctgcccagcttggtgctaaggctaggtggtggtgacacacaacagggaggaaattgacaccatcgtgctggagctcacagtctagtgtgggagagacactatgcaaataaataggcaactataggattggggtaagtgttatgaaggaaaagtaagtgtaaagtcgggctaataacaaaggtttctaatttggactggcaggttaggaaaggcttctttgcagaattaaaattccagctgagaacagaaggatgaacatgagttattgagggactggcagacccttaaccgtttgggtctgcatcagaagagtgtgagaagtcactgaagggcattcagaacagagctgagtgggaggttgatttggttagttctgagctcctgaaggatcactgcgacgtcaggaaaagagcagggaggaatgagaagctgcaagagcctgacacaggtgagaggtaatgtggcagcagctcaggctgcagagggaaagaagggctgtgttgtgtgtgtgttctggggtgctacccctcagggttgcagggcactggtcttgggagtcggtctcagtgagggagatggggtggaaatgggccacgacagagtgctcactcaggcagtgaggccatggacagggaggaagatgggagcatgtgaagaggagtagcatgagtgtgggaagcgctggccttcattgtaataaaggcaagggcaaacttcaagacaaggaagaagtcacggagcaggaagaggtgaaacaagctgtaggggaagcaagtgcttataggaaggcattgcttctgaagaggagaagggcgacagcaaagacagtttgaggccctgaacttgctcaggaaggaggaatttctgtgcacctgaaactaattggaaaatgaaagaagaggagtcccagagtctagtgcccaccaacctccagctagccctgggatcttggccaaagcactccgctctgggcctcagcctcgtcctctgggaaaaagaagggtcagactgacatctctgcagaggctggggtggggggcggaaaccacctgcagcggtgcaagatttcatgtgaagaaagcattctacacctggagaaactgcaaaccgtaggtccatgtggtatctaagggtcccttccagttctgtaaagcctacagttctgtaaagaatacagaatcagaaacaggctctgatgaaggggtcagtgacaggagtcactccgaatgagctcagccatctcatctcccaaagcaagggtcaggggtcacaggaacttgaagggcagtatagagactgaaaccagtgagtcgtcgagaggatgctcaaaggttgctgggcagcactgatgccacggtggagactgatatcataaatgtgcagtcagccgtatttttggcagactctgaagcctgagagcactaaaaagagacagcggcgtgtcccagggtggggcttagccatgcaggcatggcagaaggcccaggcggtgtggagtctgtgtggtatcgcgggcaacattgccatgactgtagtcaagcctggtgttaaagggtgagagtgatggggaggatccagtgaggacaaatgttgggtcctctgaaagagcaggagggatcatagaaagggaggctctggccagagtcatggagcatctgagctcagcacccaggagtggaagcaattctatgccgtgcaagggcaggatgtggccctcccaataataagagctgtgggggagaggacgtcctggagttaaggatgctgagtcagacgcattgtcaatgtggatgatgactgcagtgccatctgacttatattaaaggcgaatttgggacaattcagggaaatactattttacacagcaggtagtaaacatatggcactctttcctctaagaagaggggagaggctgaaaatacaaatggctctcaagaagttcaaatatgtctcaaataatgacaaatgcaaactgagtaactaggggaaaaaaggagtttggggtttgtctctaattctgaacctgaaaagcacgaaggaaaatcatggtctcccagaaggtttgtcttggagtcctgggtggagaaagtatctggggttgcatgaacttcagttcctacccagtggatctgttctgatggtctcatgttccttaccagccttctctccctcctcgctcttcttcaagaatccgctcaacctgaggtaggaattgtgcctcattggaacaacaacagtggagacaaccaggaagccttccgagtgtgctgtgcatagagaagccagagcccccagctgttctcagagttctttggagattgtgaagatcggtagcagggaggcattggccacagtgaaccggcctagggtgtggaccagcaccatggcaccaaggcatctgggctcctgatggcaccgaggcacccgggctcctggcttgcgtcctctcactgcaggagcacctttccagcccagaaccctgggccacctcccaggaggcaaagaggtcctatcattaacgccaaggtgtgcaaagggagcagaaagaaccaaggcgttcagacgtcacagagttctcacctcagctccccatgggcatggagttttccctggcctccagacaaaagccgctgagcagtgtcctccccttcgcaaggagtggagcctgcctgacatggaacttagccatttggcggttgcttgtcaaaagtgccagcctttaaaagcggatgaggttttgatccccatgaacctaaaattctgctcacaatcccggaggatagcaacaatagcaacaaaatcagtcttcaagtgtggtgcccaggcttatccatccagacctgtaacaaagcagacaagaaggctctgtccatttcgtgctcagaatgtgcccggatgccacagaaggacctgtagtccacgactgtgcttgaagcaggacctcctttcccagcacccccagcgccaatcctgcttcccagggtcatttcccttggagacgaacactcaggattaggtttccccagaggggagcttttcagagcccacttgcacttgtgacccgcttgcactgtgagcaagacaacgcctcatggcaaagggccggtggtcgtcatcaaggggcaccccagacaggactactgaggtgtttctgaaagaaggcctgggaccaggctaggcttggagtcagagtgacaaggctgaagtccatggtcacccacttgagcttatggttaacagcaaggggagacaaccacccaaaagcagcctgggaagacactgaaggtctggggctcagcatggccccgctggagaagagagcacctaggctccccagcacccaattagcagctgggaaacatttgtttgctggttaaactgtggctgtaaataacaatgctgccctgggctcccagtccccctcccacacgctgttaacctgtgattaagccctccagccctcacaggcagtctttgcgggtgggatgaggttattagctaaccgttcggagcagtaaaggcgcttggctcagactcgcagtgccccagagatgtaattatctcatgcacgatggctttgccacctgtcacatcttctggcttaatttttttaataagaaataacgagaggggctggcgttttcttgctctgcgacacagctagctgtgtgccgcgctgggacgtcgcaggcctgcggcggttgcctcccagactcccttctcctgtttcctccccatgcctctccttgttgctccaccactgtctccatccctttcttcatctctaacttgcgttctgtccttctgcttctccatctgaacattgtcaccacctgcactatccccagcgttcatgcccttctcctagcaccaaagccaagctgacaggtgccttctaatggtctcaactgcttacattctctcactctccctgtctctctctctttggctcagccttctctcctccacacttctcttttacagtctgtccctcctgccctcttctccagcctcctgcctcccctggactcttccctacatgacctagggagcctcaggacttccttgaaggttctgcctttccatggaacctcctccctgttccatgacccttccaggcagccaccctcacacccaccctgagcttctgcccagaggtccccaggtcttcagggctgcgtgtgaccgtcagcatcctgggtttctcctcggagtctggggctggcgccttaggcctcctctgcagctcttgggtgggggctgttgtggcccctccatttctggctggctccttttgctggtcttcccttcataaccctactctagctgggctctggcagacagctgtgaggtctgtgccgacctgttcttgcctgtgatttttctgctgttggggtcctcttgtcatcaggagaggccttttctttctctgcagcttgtctcaagatacagctcttcctaacctgacctcatagaagtttctaggcagaccctgaggacctgctactctccctctgcagcaaggattgtctatacttagaagatgctagccaggccagacctcagtctccacattcaaatacataaatagggttctttctctcccaagatgttctagttcacaccatgcctccttccagcacccacacgaaattacctggggaacatcaaatttccctgggactgttgaccgtcttttaaatgcacgtgtgtgtccatcctttggtaacatttcctttttctttttcagccaccggatctccaagtcaaagttcaggtgagtgagactcacgctgctcttccttccttctgccaccagctctgtcttcagccaccctgttgggtggcccaaggtaatacctacaagttgccagtagtgtaagggctgttcttctaagggggtaactactttctgtatggccatcaagaaaaagcttatggctcagatcagacaaataatccagcggttgatatttgttgaatgatcttggactgtccatctttttggcagcacagtccctaggaagttgtcagaccaaatgtgttttcctcccttctaagatgaagtccagttaaaagaaacataaagtgagcccttgtgactgtcatgacctacttcatgtttatagaacatggtgagatgtaacctttgatgatgatggaaagcacgtaggattatgacacccgtctgtgtcactgctcttgacaatgacagaacctacaaaaggatccagggtcctcagcccccatctgcctcccagcctcacttcctgcacttccatgaaaataacctttgttccccctacaaggaacttcttgcagttatccaaatgttccctgtcctggtgcacactgaggcccctgcatggagccaatccttcacttaaatcactatgcccccatgccttcatctggagaactcacacttctgttcagaccctcagatgtgactgcttccgtgttactgctttctctgccatttcactgggcctggaaaataccttctgcaaactccagggagagttactcagctcccccttccctggtgctttgctgatgcctctgtcacagcactcagcacatgacactcggattactggctcacagtcccctgcttccaaaggctctgcctgcatgcctccaggggttatttccagagcacccagctcagtgcctgtccagtggtgaacgtccatacatgtgtgttgaatgaatgagtggacagatgtgtgcagggagaatgtgaattcactcccacaaagcttgtatgtgccaaaaaatattggttatttttcataattgagctaatcttgtttccctagccctatctcctacatggcaggagcatagagaaatttttatccagctgagtaaatgtagcccagtgctgtattttaaacagtcccttaaggtaaagtgatttgtctctcagattgcctctctcccagctcctctcttggacggagctggacacatggcggagagggactttgagatcccaggaagcagggaatgatgagggctggtcctagaagccacgcgagccctctggatgcttgctcatctctgctgcatggggctaggctgaactgctgtctgaactggtacctgctgaggtccatctggttagggcatccactgctggagtccatgcccttagggcatccactgctggagtccatgccctctacttgcctccggccttgaaatctccacctctgctctctgacccttgagttctgttggcccactgactttagcacctctatacctcagctgaggacatggacacttccaggtccctcacactccgtgaaggagctagaggagacagcagccctatgacaggctcattggcctaccggtgtcccatcacaacctctgtaacagccaggataagcttcaagccaagggctgaccttctcccagggtctgccgaggcactccaccagccccagtgttgctgggcttccccgtggccatctgggtgtttctaaagcaactccccaccaacctcttgggctgtggtgaccaagggctaaaaattaagtggggaccctggtgtctgacttttgctccacttctgataccttctttctctcccgtttcactaggactggaaaatacaggcttttttcccaatccttgtttctctcaaaccaagacctcatctacataaaacatctagggtcaggcccatccactctagctcttattacagagcaagagctccagaaatattaaaaaaaaaaaatttctctctctcagtaatgcttggctgttactgcttaatctccagcatctggagaagtggctggtacataacaagaacctaataaatatttgctgggtgagtgagtaattaataaatgaatgatcttgccccagtaagacaatagacttgacacagattcaaacaaaatatctaatttgacagtcaaagctgaaaaagcatgttgtgctttaacagttccaaagcccccacacaataagagtaaagggattaaaaatacacttgaaaatatttccaaaatatcattctcagttcatgcaagtgagtaaatcataaattaataaatgaatgaatgaatgaatgaatatgatctggaggatggaagggaaaattacatacttgtgtctcgagttagagattgcctggaacactctgggaacattattttcatccagtgatctatggtgcaaactgtgcttttcaacaagagggaaagagcagtggtgcctgtaaacctctggagtctccctcggccctgaggctttgctatgtgctggccattcagccctgatcatctgcctctgggaaggccttctccttctgcagccacccctcaatacaccgcagtaatgcggacggcagattttgttctcctaaaggcttacagctagtagattggcactatcattgaaactcatttccagatgaggatcctgaggctttgagaggcccaggtcacagggctctagtatggctgagtcagagctcatacccaggggctctgctgccaatcactgtgccatccttgtgatgaggttctgcccgggaatagtaaaccctgttcctgtatagctagtgtgtccgcagagtgtgtaactctagagccatgctattcaacagaaatatagtgcaagccacatatgtacttttaaaaatgttctagtaggcaggttaaaaaataaaaagaaacaggaaatttctttgatttaaaccagtatctctaaaacattactatttcaatatgtaattcacataaaaattattaatgacatattttgcattcatccttttgtgccaagtctttgaaattcagtgtgtgtttttcccttactgcccatctcagtctggactgaccatgtttcccatgcacggtagctgcatgttgctagcggctgccacgcaaggccacgtggccctggaggtttcacacatgagcaggtatcacacagcagccgtctaatctagattcagcagttcactgatggtgtctgcttagggaatatcaaaggttacaaatagattgaaaatgccaccaacgttttcaaagtattcctgatcattttctcaagttaggtgaaacagtttaacaattacagataatggaatttgagtctcaaactggccttttcctttgcaaaacagaatgatccaaagtcacggtttctttaaagaactgtaagaatggagtctctagggaaaatgtggccggttagtggattacagccatagtggaggattcccttggtaatccaggttttcacttagaggaattagttaaaataagagatttgtgacatttggagctcactgttcagaataaatgtaaacagttatgaaacaaatgattcaggaagtcttttgtaacctgaagggattgattacacaagttggagtttctggatctcaactttacggagttctgaagtgaacctcacggggttctgaaattgggaggactagcttgcccagtcttcagtgaaatgtgcttccaatgttctcttcacttctgccataccatcagcaacaaggcacaaatccaaatttgccccaatctctaatagtcctttgtaaagttacttatttacaagagaattaaacttaatgattttctgtggtgtttgttgttggttctggtaaaaaaaaaaaaaaaaaaaaaaagtggaaacttactctagccactagaaggagcctgcagggcccatcattttgatgttgtcgacgattccagatgcctgtgcaccattgcatgtcaagcaaactattttaggagcactgtccgctcctcacctccaccctcagccctggttcacaagagctccgggaatcttcaagccttgtcttccagagggaggtagtacatttgcgtagagttcgtctctgctgctcaaccgtgccatcagccaggggttcccgtgcaggatggactgtgctgagtcccatgggtctgtaaccaagtgtaagacacaacccgattccttcgtgggtcttgtgagctccgcggagaggcaggaaccatacaaatgaaacgtaactgacagtacaaggaaatgggaactcatttcctctggggacccttctcgcctaaggtgtcctttcgtgtgctccctggtggacccgcccagcactcaggccctgctgtgactgctcacttagtggtctgtgtctccgtgtagcttttacgcagaggaggcctgtgagcgctgtgctagctactgagtatctggtgcctagcccgtggtcagtgtttagtaactatttcttggatgtgtaactaaaatgagtaatgcagacagtaagcgctgaagagtgccaaggctgagaagactagaagcatgcatcgtggagaagctgggactcagtgtgagccccacaggaggggcaggacagacaggatgaagcaacggtggagtttccggtagctgggaggacttgccttgcagctggacaggcaagaggaaggcccagtgtagggagaagggcaggtggagctggggctgcgagagcagaagtttagaagcagtgatcccgaagtttagagacatagatgagacccattcgtatccatccctctctcctgtgtctacatatggaaggttctatttctagagaaaatgacttccagttagtgtgaagggaatatgaatagcaggcaaatttctcctccctattttatcatttaatttctgtatcctccatgcatatgtaaacataaataaatttacacattctaataaaccattacatttattatacagtaggaagtgttgccaggaaaccagttgtcaagcaaagctatattttgaagagtgggaggtgcataattatctttaaatactttctctggatagtaattaccccacccccaccccagcccaaatccatgtgactctcccaaatgggtctgctcaggagcaccccagttgaaagggacaccgtcctgtccactccggccactcctcaggggtctgtgcagagcagctccagacccatgggaccagcctgaccacacagcacccatatccactactcccaagcatgaggaaaaaggggcataatcaagctctcatattaaacccactccaagacagctctacataccgcaaagaaagcaaccttgattgccttggactctgaataacaattatcagtgatttctggaacttgagactgtatctatttaaaacatgttctttgcaaacttcactgtcagctctttaagatcagatatgagtttgtcctgaaaattcattttttaggggaataaactacttgccaaatttctgtacagtattaataatcacaatcacaggaaaaaagcagaggcatgccctgcaagataagactgtttagtatcaagatctggcaaacttcagaggtcgcctctcaagaggaccatctgggactcattgtctcatttctttgtccctctgtccaccctccaccatcctccctcggatccagggcagtatgtctgggggtgcaagaatcccaaagtgcatttagaaatcataacgttttaaattgttaatgtttatgggcactaatgggtgtatatatttatgaggtgcatgtgatgttttgatccaggtgtacaatgtgcaaaaatcaaaccagggttatcagggtgttcctcacatcaagcacttatcatttctttgtattacgaacattccaattccagtcttttagtttattttaaaatatgcaataaattatcatgactgtagtcaccatccttctctcctatgttgtatgatcaaatattacatcatatttattctatttaactatattttttcacctatttaccatctccactaccctttccagcttctggtaaccatcattctactctctgtatccatgagttcaattgctttaatttttagctcccacatatgagtgagaatatgtacaatttgtctttctgtgcctggcttatttcacttaatataatggcctccagttccatccatgttgttgcaaatgacagaatttcattcttttttatagctgaacaatattccattgtgtacatgtaccacattttcttcattcatttgctgatgggcgcttaggttgattctgtatcttggctattgtaaatagtgccgcagtgaacataggagaacataggagtgcagatatctcttcagtatacagattggaaaccatgttttccacctggtggcctgcttccctgtgtagtggattttcccccaagtggtaggccagtgtcgcatgttaaggtgtggccctcactggagatggccttcaagctagagcagaacactgcctggattaatcctttttcccctccctgctcctcaagccaaaaactaagttctccctgcagtcctgaagaaagagtacccttctttgattactcttcactctcctaacctcatcttagatttagcaaagtcttggtaacaggattttctgcagatcatagatagaaaaatgacagagtagaaaggtggatgaagtcaggctactccaagaggcaattttgggggtatgtgcagggatccgtaacagcccaggttggcatcttggagtttgctgatgtttggaggggcttctgccctggaagtagaggaccaaggctgagggcagtgcacacagcacggagctgtccctgccccctggggcacacccacatgtggtgctgctacatgcccgggggctaggaaggaataggccattcacagaccagtgagttcacacagatggggcttgctgttccaccaccagcataacttgacccaggaggtgacgctgaggcttgatggtcatctctggcaggaagattggagaaacggactcatgccatggactgtgatttagaatggaggacctcatttcagcttccttgcgctgaagtggagggccggttttcacatccagacttagtatgccacacacagacacacacacaccggaaacaaagttttatgtaaaaatatttttgcttactgcttactttaaaaagcagtttccttacgatatgatacgcactgtgatattttccactctattcctttattcagtgccaggcatgacctactcaatagatttcatgacccactaatgggctgcagtgtgaggtttgaaacctctgcccagaggcagattctgcatgcttatttagaggaatgtctgtctagacgagagagattcatagaaaggagatcattttatggaaaaatacagatattcatggactttatcaccaggattctactttgtttctcctcctgccttcattacccaggcaggagctgtatcttcaatgcctcgtgggtctgcgtacaagccctacaggtgccccaaagccatgtgcagagctaagcaccccatttttctcataactgacccctctgcctggagctctactcccgctcctctggccctcctctgtgctgccctcccaaatcgccccagctaaaaatgttggcagtcccttccatacctgtctttcttattctgcacatccgctcatctcaagggactattgattctgcctctaaaattgctgccagctctgtgtcatcttttccattaatatagctattgccttcatcatctctaacctggagaacaggaagagaattcctcatactctccctggtctagaaggtgacagaggggctgtttttgtggggtgttccaatccaacctgatcatgtcctttccccctccccaagccctcagcatggcccctgcagtctcctcctcagcacctctccagctatggttcttctctccttgcacagtgcagccatttattaaccatgtcgtctactgaattcaaccaaacagagctgtatattttctctgtatcaggaaaatgaaaacgcctccaccatagaatcttaaaatgtgtttctttaggatcatcttagccactggttctcaaccatcattacacattagaaccacctggggagccttaaaaatacccaaccccggccgggcgcggtggctcacgcctgtaatcccagcactttgggaggccgaggcgggtggatcatgaggtcaggagatcgagaccatcctggctaacaaggtgaaacccgtctctactaaaaatacaaaaaattagccgggcgcggtggcgggcgcctgtagtcccagctactcgggaggctgaggcaggagaatggcgtgaacccgggaagcggagcttgcagtgagccgagattgcgccactgcagtccgcagtccggcctgggcgacagagcgagactccgtctcagaaaaaaaaaaaaaaaaaaaaatacccaacccctagagaatcagacttaattggtttggtgttggggcttgcggaccagtggggttttggggagggttccctaggtaattctgtgtgtagccaggtttgagaatcactgacaaaggctcctaaaccaagatacggggaagagtccatggagcatggatgagctttgaggggtctgtgtgctgtgtgggctctcaagtaaaggtgtgtgtgtgggcatgtgcccatttttctgaaaggcagatctaaacattcatcagattctggaaagattctataacccagaaaaacaaagagcctgtgctccagatgaaccccttctaccatatggatgtggcacacacagtcagggccaagaggctgggcagaaaactacggatggctctgcctgctgtgatattggtcgagtactcaacctccccagccctgagttttctcctccacaaaaatcaggataatgcgtgctttgcagagttactgaaagaattggagagaaggcatgagaagtgcctgatgtggtactgggcccctcctccactgttactaataatgctcttattgcttacaacactatttctaagaatgctgtttcacaaaaattaaaaaaacttccatttattgagcatcttcaacttcaaagcagccagatgcattataaggtatttgatccatccccacaataaccccatgaggtcggccctcttcccgggagaactgaagcttggaggagttcaggggcatccccaaggcggcagggcctggttagctggatgagaagctgggctccttgccaccagattgggctgctctagcaaggccagatcagtgaggggcgagaagagccatggtgctgcatcttgggttggaggaaacctgaattcacagccaaccccacccttctctccctgtcccctttccagccgctactggcgccggtggaatcggttctgcagaaggaagtgccgcgccgcagtcaagtctaatgtcttctactggctggtgattttcctggtgttcctcaacacgctcaccattgcctctgagcactacaaccagcccaactggctcacagaagtccaaggtgagcggcggccccagctctgctctggtttcctcctggtaactcagccccaaggcccaggggagggcataaccacaggcagaaggtggaggggaaagcagccaatggtcggggctcttggcaggtgctgtgctggagacaccaagggcctggcagttccaaagccccacaataaaatgcgctaccttgttaaaaacagacacggctctcctgactgggcccacaccatcagcctgccccaaagtcactgttggacccaggtgatgaggaaaggggctgcagcttgtttgcctatctcagactcctggctgccaactccccagcatggattttaaatacctgggggccttcctacagccctgaggtggccttaaccagaacacatgaggatggaatgagcaaaaaggcagagaagagaatagggcctgagcacaaggaaccgtcttcaatgggtcgttcattctcattatccttccttgggcccctagacgagggtcccactagccaggcctcagcatcattgctgggcagtcaagaagacctggccccatcctccacagctgctttccagagtcctgggaggcagggggtctagtggcggagaagtcagactcagacagtgcggctccaactgttggctgtttggcctgcacaggctactcacctctttgaacctcctttctcatctctgaaaatgggcatgacgatggtggtaccatccccacaggcctgctatgaggaggagagattgtgtgtgctgagcctatggtgcatgggagatgctcagtaaatgtctgttatgattgtgacgagagagccctttcccattggcttggccccaacttctgttctggccgaggtggatgggagaggtgtcatgggggatcttttttccaatggagataattactgtatttcctttccctgcctccctctctgcctcctctggccctgctcggatctcatccctctcctgggcctgccagacacggcaaacaaggccctgctggccctgttcacggcagagatgctcctgaagatgtacagcctgggcctgcaggcctacttcgtgtccctcttcaaccgctttgactgcttcgtcgtgtgtggcggcatcctggagaccatcctggtggagaccaagatcatgtccccactgggcatctccgtgctcagatgcgtccggctgctgaggattttcaagatcacgaggtactgggctccccctctcactttgaagaggggactcaggaagaagttcttccagagggcaagggaggtggcaaggcctgggtgggaggggggctgttcttcctcaaagggtgtctctgaagttcacatgcaatgggggtagtttgtgttcatttagatggcacatcatttggaaattcctctggctgctaataccagagactcaactcagtaatgtaagcaagctagggacttattcagccatggaaaaaaagtccagaggcagctagctgaggtgccttcaagaagagggtcagggactcaatctcttctcctgtgcttcaccagccttggtgctgattcttctccagggtcataagatgacttctggagactgagccatcacattcaaattggaggtgggaagaagagaaaggagcaaaagggccgaccaccccggccaagtcagcttctccactcccagaagtcactcccagacacacccattaggactgctgctgtcaaaaaaaactgaaaatcataagggttggcaatgacatggagaaattggaacccttgtgcactatgggtgggagtgtaaaatggtgcagccaccgtgggaaatggtatggcagttcctaaaaacgttaatgataggattaccctctcatccatcaattccacttctgggtatatgcccaaaataattgaaagtaggatctcaaagagatatttgcacacccaagtgccttagacagatgaatgtatttttaaaatgtggtctacacatacagttcaatattattcagtcttaaaaaggaaggaaatcctgacacatgctacaaagtagatgaaacttaaggacattatgctaagtgaaataagccagtcacagaaagacaaatactgtatgattccatttatatgtggctcttagagtagtcagattcacagagacagaaagcagaatggtgggcgcccagggctggagggagggggcagtggggagttagtgtttaatgggttctggagatggaggatggtggtggtttcacaacagcgtgaatgtatttagcaccactgaattctacagtttaaaaaaaaaggttaagatggtaaattttatgttatgtgtattttaacacagtgaaacaaattggaagaaatcttccagaagtctcagcaagggcttctgttcttgagcacctgagctgttagggaggctgagaaatgcagtattctagcaggacaagttctgctgaaaatgcgttcaagatctagccactgtaaagggctgtggacactgcactgcagatggtgttcaccctctgtccacatggccacccctccatatgtcagtccggcacctacccaaagcaggccatctccctcactgtctaggccaagcagtgactctcaagacaaggacagggctgaggggcaccatgctctaggacaatgattttcacctgacttatgaccactgggagtggtggaatccatttattggatcacaaccatcattttaaaacatactgaaatataattcatatcccatatatttaccccttacaatgtgtaacttaattgtttttttatattcatggttatgcaaccatcaccatgttctagttgtagaacattttcatcaccccagaaagaaactccatacccattccacatttcccccatcttccctcccagcaaccaaattcactttatgtctctatagagttgcctattttggaccattcatgtgagtgaaatcttataatatgtgtttttgtgatggcctctttgacttagaataatgttttcaagggccatccatgttgtagcatagatcagtactttgtttccttttatggtgaataatattccattgtagggatatactacattttgtgtattcatgtatcagtgatggacatttggttgttactatcttttggctcctatgaataatgctgctatgaacattcatgttcaagtcttcctatagatgtaggcttttgtttttcttggataggtacctcggagtggaatttctagattatttggtaacaatatgtttaagattttgaggaactgtcaaactgttttccaaagagactaaagcatcttacatttccaccagcaatgtataagggttccaatttcttcacattctcacaagcatcgtttttaaagaaagaatgaaatagaataggaaaacatcagagggtctcacatgaacgtaaacattgtttcataaaaagctgagatgcagacctgacttgcagtagaatacatatttcttaatgtgcgttatgatcaaccttagaagacatatgggaaacacctggaaggaattttcaacctgtgcccctctaaggtacaagtcccctgtccttaaaaatctgctttgggggctcccaaaatctctgctttggggaatctttgataacaggagcactaaaaccatccgttggattgtgatgggtaaaaagggatggaggttggtgtcttcagttcaggatctggagctgatggcatcttgctcagagcgtgtttctgagtgtccctaggtgttgctcttctcgtcacaattctcttggcaaccacccagagcatggtcacatggtgttgtggatggtccggggaggtagacatttaaagtgtttcatttagtgcacagaaaggactcaatatgcagaagcttttattattcatctaatattatgactgctattattagaaggaagaaagagaagagagctaatagtgacctacatattcacatactcttgttcttacttatttacccactacgtatatactgtgtattgagctcagagagatggaaaaaatcgaaaaataaggcgtatggcgtgaactaaatccaggagaaatgtatagtctggttggggagatggagtttgtgcacatgaagagattaaaggaaaatctatgacagaatataatgagctggcaaagtgtggtgggcgtgggaattacctgctgtgagaaattgggagcaggagatagctcctggagaaggttgaatctcagatgagggacttaacagacacccacgattaaaatccagaagtttaatgctcctaagcaacagccttctttccctctctgaccccatcgaaagagagctcttcctaagtgtcctgaatatgttggcattacagaaagtccttggtttacagtgaaagtggtagaaatccttatatcagcaatgattaccatgcaccagtgcttactctgtgccagatagggtgagcagaggcctacgaatgttagcttgagtgatcctcccaagtacctacatgaggatgaggataggctactactattattattcccactttgcagatgagagactgaggcttagagagttgtcagttgcccaaggtcacaaaactgctcagaggtaacactgggattaaaaggcaaggcaggtctgtggtctgacttgaggtgctatactcctaaccactgccatgcactgcagagctgagagctgacctgtcttcttgtctaggtccctgagacaggacttaaaagatctttatgccctggttcttgttagataattgccgattctacttgctcctcctggggtctggtaaaactatttttaacttgcagttttcaatgcctcttaaataattctcaaaagtccctgttttgggcttttatgtatatatttctatagaaaagaaatcttgctgctatatattgttatgacatcttgaaaagatttaacattcattctatttttaatcaccaatttatttctaatctgaagatattgccaagaaaccatttttaaaaatctatcttaatcagagagcttcctgtagtccctccacaagaaggagtagtagtattttcagatctctatgaagtctataaacagaaaaaatcattgtctaattgaaagtgactgtggcaaaggccgtcatcttcctattttcaagtctccaaagcctctgggggctttcggaaagcaacaaagagactaattaggttgggggatcccataagtccgtctccagcgccagccttgggactgggtgacagtgaccaagaaaaatgcctaaaatatgggttgggagtggacattgtggtcccttcagctgaaccttgaaatgggtcatctgtgcatggtcctgccatcagacaagtgcatgccttcttcttttaaaatatcttggaaagtactttgcaatgtcttgctgctactcatatgtagaagaaatttcttctctttttttttttttttttttttacaatgtagtctgaaccagtaattgcaattcttaaacttagctgaacccatgaaggagttcattaaggagctcatctctagagattttggccagcaactcctggagagttccatgctagtggtccaatgaccgacctcacttgaagaaccactggcctaatttcctactgctgctcttggtctgctttcttctcctaaaatactgcccttcatatgcaatcggaaaacttgattattattcctcctcctcctcctcctcctcttcctcctccttctcttcttcctcctcctcctcctctcctcctccttctcctcttcctcctcttcctcctccttcttctcttcctcctcctcctgttcctcctcctcttcctcttcctgctccttctcctcttcctcctcctcctcttcctccttctcctcttcctcctcctcctcctctcctgctccttctcctcttcctccttcttcttctcttcctccttctcccctcctccttctcctctcctcctccttctcctctcctcctccttctcctctcctcctccttctcctcttcctcctcctcctctcctcctccttctcctcttcctcctcctctcttcctcctcttcctcctccttcttctcttcctccttctcctcttcctcctcctcttcctcctcctcttcctcttcctgctccttctcctcttcctcctccttcttctgttcctccttctcctctcctcctcctcctcctctcctccttctcctctcctcctcctcccctcctccttctcttcctcctcctcttcctcctcctcctccttctcttcttcttctcctctcctcctcttcttcctccttctcctcctcctcttcctcctcctcctctcctcctccttctcctcttcctcttcctcctctcctcctcctcctcctgtcctcttccttctcctccttcttctcctcctcctcctccttcttcttccttttcttcttcttcttctcttccctcttcttttttcaagacaggatctcactctgtcacctaggctggagtgtggtagcataatcatagctcactgtagcctcaaactcctgggctcaagtgatactccagcctcgtctcagcctcccaagtaactgggactataagtgccatgtctggctaatatttttattttttgtagagatggggtctcactatattgcccaggcaggtctggaactcctggacttaagagatcctctcacttggctgaccaccttgcccagccaaaaaacttgattcttacatctccactgtcttctccatactgtagtctctaattctgtcaagatggtacttttgatagtttttgactgagaaaacacatcaaggtaagaactactatgaattcagcaaagcttttaaatttaaattcctacacatctgtgtatgtttgaaaagtggtaatatgaatgcaagacaaggctgtttattcagagtagtataatgcttggtgtacacatggattcatggatccctttctagaattctagaattccaggctgctcttccctcacccaggacccatggtccaagggtcgggaacagggatctaaatcaatggttcttcaccctgaggtcatgacacagtggtacatccagagcagctggatagtgatagcaaataatttattactgagagctgaaattccaaagtttgtgaatagtttctttaaaaaataaaacaaattaatattgtccttgtaacataatagcatcactctgtcacttgcattacaaaatgcttctatgaatgggtgagatccgggtggacttacaactcatccatgatgcctgaagggagcagatgtctttgatatatcattatgaggaaaatgaattatttacatactgacattttttgtgttttgtcaaaatctgagaacaccttagggagtatgctacatgtatgaagatcattcatcctcttgttgagaacaccttagggaatgtgctacatgtatgaatatcattcatcctattgtttcaagacaaaaaaaaggccaggaagcctgtactagactgtaagaaaattactttatagaaaagattgaggaagacaagattcctgctcattgaaaacagtggggcacacgcatggccggaatctttgtcatctttgagtaaatgccccagtacggtgggccttccagcctcatgatggattgggttcttccacctgtggctcttggtgctgcccagattcaatatccagtttttctactctttgtcagcccagtctgacatattctgtggggtgggagaagggctccagacagattcaatccggacgtgataccagtttactgattgcatctcatttttgacacacttggttttcaagtgcagtgaggcccctctagcacttgctgtttcccctctcacaccttcaatccctctttatttctcctgctgctcctcccctgcagctcccttcccaggccttgaaatgggagctggggctgattcagcacagacagattggctcataaatcttggccacatatgggccccacagagctccaggtgagagccgttagcacatctcccaggctcgaaatgtctccatgtccctaccagcatctggccttgagcagcagatccagccccacaccttcccagctcttccatcaccttctagcccccactcttctcaggccccctggagcctctgagctcattgagggccattattaaggaagtctgtttggcagatgcccagttccctggcaggggtctgtggcaaaggtagctcagactccagagcctgcaatgtggctgtcaacacaatgggtggttctcctttggtatgggaatggactggtgtcacctactaggagaaagattaaaaagatgcaggtgaggatgactccctagccctgacacaactgtggttggaggggccaactaggtgacactgagtagccccgtggcccagaagctcagagaagcatgctgctaaggccatccccaggtccaggccagaccaccttgcccgcttgaccaggttacactccccatgcaggttccgttcttaatgtgaccgagacatctgctgcaaacagagaagacaagacctttgaacttgttaactaagtcagcccttgcctcaaaagtgaaaccacaaaatggtcttcccagcctgctagaatggacgggagcaggggcaggtaccagtagaaactgaaccggtagttgaggccttggggcccaggttgtcccagaccaaaatactctagaattctgcttgactcctcctggcccagcccagcatatacggttctgcctctgggcatcctaatccctcccagctctattgtgtcttaaggggctggggctcaatttgacggaagctctgctctgaggacaccccctcctgtgctcacttgctggatggattctacctgcttccccaggtggcctcagccaattctcactcctcttcactccattgcctcccatgaagccccagccacacagattcaccacaggggactgctttataactgctcttttaacaatagatcacttgccaccgaaactaagaatttttttttagccttcaggatgagaacattttgggcaggtatcaaactcagttatgaccttctctggaacacagagagaatagggtggaacatttgcagagcatccgaaagtggtgggtactgttattttgaagatctcttatttatggcaagctcaatgctctgctctatacctagaataaaggtaaaggacctggccctgagctctttgaagcaaaaggttcatgagatgaaagttccagttcaaggaaggctcgggtcactttatattatagaagaggaggaagaattccacagagccccaaacccagagacagacctagagacggggaaacaaatggagataaaaggatttctgaacagatggtggtaacttaaatcaggagaggcagagggaaaaggtaacagaagtgacatggtggtcggcaagtgagagagcttaaagggaggctgggagtaggaaggtagagggaaggagagaatttaggtggcagagaacttgatgtgatgaaaagccctcagatgtgctgtacttttaaggataaaacagggagccgagtgggtcagatgggggatggggtgagcagggacgcacagtttggagagaatgattccagcagctggagaatgggaaaggaaagttgatgccaatgatggcgacgcaggcagagtgtctggggggtgatctagagctggacaccggcacccgggtgctgtagagcccacagtactgaatgtgagcttgtgggcatgtgtgtgcactgctctgatgagagagtgcttcatttttatgcttttccatgaggcctgtgaccaaaagacatgaagtgctttgctctgctgctgctcgcttctctccaaagctcttgcctttttggtgtgtgagcgtgtgtatctcatatttttgaccaatgaggaaaaaagcttcagctgattgtgaatgtgccattaacccctctagtttaccaacagtgaatcttcctaaaaaagatggtgattctaggataggaggccatcatccaatcttcaggccatagctgtgcgagccatcagaccacattaagaggagggagtgtgaggacctgcaggaccgccagctgtttatttaagtggtttcacgtcaccctacccacctcaaaggctgccacctggacacctccaaatcccatccatatcagtgatagtgagcccccaccctcaacctgctaccagccaaggcctgccagtctccagaattcagcccatctcctctgaaccctatcagcattctttgccacatcatcatttcagcaattcctttgtctcatcttctagatgagcatataaaacatccctgataatttgcacgttaggaatggaagccttctgctcagcaagctgagcacccctcgtgatgccaggccctgggcagcagcctgccccctttatcctgctgcaaaggaaaggaaaggacaggtggcaggcctgcctcgggcccaaccccatctttctctctgttgaatgggaagcaacagtaggctgaagacaaacagcacaaacaaccatatctctgtctgtctgtctgtctgagccatgttttaactgtgttactggtccccaggacagtgtctttcccctcaggtgtttttcatgtagacagtaggctggtgccaattcatcttttaaacagaggctgacctgtgccctcaaaactgggaccagtgaatttgagaatgtgagttcttccccaaaggtgacacatgttcacagtgatctggaaatcctactcccaaggtttgctcaagccacagaaaccgttttctgtaggacatattgatacatattagtttgatgcatggtctggcaatggaacagtcaggaatctcagaaaatccctccccatggatgtagggaagctatgggaataggaaggctatgggagcaggggcaggcagccacttctcactgtttggcaaagtgtgttcaacttaagtgcacacgcacacaaacacacatgcacagaagcacccatgcacctccatggccccttgcctttccctccaggaagtaccaatgtgtcatatgaatagtaaggttcattcattcactgaacaaaatgtttgctcatcacctgctttgggccaggcactgttctaagctccaaggatataaatgtaacagatgggttccttctcccatggcctcacattctggcgagggcaagcagacaataagcaaagaagtaattattcttttttttttttttttgagacggagtctcgctctgtcgcccaggctggagtgcagtggcgcgatctcggctcactgcaagctccgcctcccgggttcacgccattctcctgcctcagcctcccgagtagctgggactacaggcgcccgctaccacacccggctaattttttgtatttttagtagagacggggtttcaccgtgttagccaggatggtctcgatctcctgacctcgtgatccgcccgcctcggcctcccaaagtgctgggattacaggcgtgagccaccgcgcccggccagaagtaattattctttgagagtaatgagggatagagcggtggccaggggagatgtgaggcctgaaggagctgaaggggtgagctccactgacgtctgccaaagaacctgcggacggacagcagcatggccttggtcaggcaggagcatgtgtaggagttggagaaagtgagggggcccgaggaaggggagtgcagctggctggtccctgaggctctgggcccagaatctacagcctctgctaggcctttgggaggactctggctttgacccagaggagaaggggaggtgactgaagcaagactgaggcttcgtgggcctcacctcatagcaacacccgctgctgctgcagcttggacatcagctgcccggagcgggggtccaggcagtgaggatgaggaggcggtgggaagtggccaaagtcaggactcattttgaagatggcgcagaaggatttgctgatgcagagtgtgagagagccaggaagatgactccgaggactttgccttgagccaaaagctatggttctcatttccttgagacggggaaggtgatgggtgggaagcaggagctccatcagagcacgaacccggtgttgtgcagcttggactttcccagacgccccaggggttgagggaggcaggggcggcagggagagtgggcagagggtgctcctccagacacagctctgtgtccctgcccacgtccttgcctttggccttcgctctaggagatccctgctagtttccatgctccatctctgccttcccaggagtgttctcccctcttagagactggatctgttcctgggccacagcctcctcctccctggagccccaagcattctgaggggctcccaggtcaggagggcccccccacctcaccatccctctctgctcctcatctggggcctcccccagactttcttgctgacggcacctggccctctccctctgcagccatgacctgcttgtcaggctcccgttggtccccatggctgtcagacatacctgggtctcaggtataatcccagttgcagttatttcccacatgcctctttacttcatgaaaacgaaggctccaaccttccatgaccattaaggcttttccagaatcttccatgacagttgagcgcacagaggatctctagaggatttgtgacttcagtgcacatgcggacactcttccctcggatacagctggaaattcttgttataaatatgcttaaagttgctggttcccaactcccagtgtattggcaggtgttggactggtcgcctgaggattaccccagccccagagtcagccccagagtcagagattagggtttcatggtgcaagggagggacctgggaatcaggatttaggaaatgctaacacacccctactggtattgttgttgttctattattaattaattaattaatattttaggacagggtctcactccgtcacccaggatgaagggcaatggtgcaaacatagctcactgcagcctcaaactcctgggctcaagtgatccttccatctcagtctccccagtaggtgggactacaggcatgcaccaccacacccagctaattttttaattttttaaagatgaggtctcacactgctgcccaagctggtctcaaactcctggcctcaagcagtcctcctgccttgacctcctaaagtgacaatcctcccaaagggggttataggcatgagccaccaccatgcccagccacctctactgatgttgatcaccgggcaggcttgggaaaactgctttagctgtaagaggggagggtgttctacccccagagaggttctcttactttttcctttaagcagatcactacagcctctagcctgcaggggctccaggcagtccatcacacatactgggttgtacagaatttatataaggacagagttgggaagctggagggggacaaaaccctgcaatcttctgccgtctaaaatttagagcctattttggtgagacaagactgtatagaacagatacaaatagatgtatattaatattctgcaacagagggggtatggctggcaggcaaaatagaagtaaggaaaagctggatttgtggaggccaaaggtgccctcgaggctgcaggttggtaaagagttcatgttgccatccaaactatgacccctctgcttctgtcccttggtgtggaaccattctctgcagagatgagcccaggctgtggctgcaatgggagtggcttgcatgtcactcactgaagcagcaaaagcaatccactgtctggattggtgatgagctgggaatctctcaagggagtgacctaggaggcaggtgggccagagggggccagagggaaatgagattgttctgttcttgctcttgctccctcagggccatgtccttttgccatggtgcacttcctggtcctgagctgaccctcacacaggtgcccaccctgcatccagcagtcattagtaggttccccctcccactttgtcatgagaaagggattttcccaggatcgctgtatttatagtggagagaggccccaggactgtaaggagtggggacctcctccccaggaatcccactgaaagcccatgtcccctcaggaccgagctcctgcccactcagaggactcgtgctttgagctgccccagtgggtgtgacaggtttgctataatctaggatttcccagactcacctgctgatcagaatcctgtaggatgcttgttagaaacaaagatatctgggccccaaactacagctaatgaatcacaatctcaagaggaaaggcccttaaagaaacaattcttaggacagcgtaaacttgggaaaccaccaagccatgaactctctcttacccgtgggtgacctaattcctgcctctgctagaaggctgctgcctataggctgagctcagactggcattcatggtgggggaaaaaaagctttctttctgtttagagaccaacagtgacaacaatgattaccaacctttatcaactatgtgccaggcactctacagggggctctttggggaaaggtggatcatgtcacgcaatcctgccatagcctaatgaagcaagggctacaacaatctccatttttttgatggggatgcagaaggcagggaagtgaaatgtcttgcccagaggcacatgcagcaggtagccggcagagctaggtcgcgggcttctgaccactgtccccctctcttccccaacagattaatcatcttgagaccttgaattaactccctccagggtggcaactcacaccaccaccaacacgcatcccccacgggcagggaaaaagagcatagagtggcagctcctctgagaacctgcagtgggcagttgtgagaatgaggcacgatggggaggacagcaaggggcagagtgctgacctccctcctgttggctctcaggtactggaactccttgagcaacctggtggcatccttgctgaactctgtgcgctccatcgcctccctgctccttctcctcttcctcttcatcatcatcttctccctcctggggatgcagctctttggaggaaagttcaactttgatgagatgcagacccggaggagcacattcgataacttcccccagtccctcctcactgtgtttcaggtatggactcttctctgctgggattcggactcggggtggttgagtggcggggtggtgggaggagtgtgggaagctgcacccttttaccgggcagccacagccatcctagatcagccctggagagcccatgcccgggagagtcttgagttttttctgtagtttccctgtccccatctgccatggaattccactagtgggtggaccattaggggaaacaatataagtggtttaaaaatgccttctcaggagaatctcttgaacccaggaggcagaggttgcagtgagccaagattgcaccactgcacactctagcctaggtgacggagcaagactccgtctcaaataaaaaaaaaaaaaatcgttcttatccatggaatcctttacttaaattctccatgaaagcccaaaacataaagaaaagcagactgctcttactgggggaggggagggtgacgaaaccctggctttcctaccatgcttgtctcttgaaaaaaatattactagcccatcaaatttgtgatttcatagatattttggcttagggcaaactcaaagtggcatctatttaagtttaaaagcagatcgattgagaggtaaaaatgaatcacatgtagatgttgtcaaagtcttgaagatgatgccccagtgacgaatgtttggggaaagctggtgtagcctgtggctgtctcagcaaacacacaactgcaaaagggtcctgacgccttacccccaggaatggctgacggtcagctcaagcatgtgtggggaaagtcagagatctttgggccaaaaagcccttttagtcacccttcaaataatattatgccaatagccaggcattttgtctaaggacagttcaatagctcagagcccctggggaggagaattgggggccaggaggagggaaagaagtgaaagggaaattttggacaattttgttgacgtagtggggcagggcagggtggttttgggtttgctgttggtctaacgctgtgtcccttattggtgggaatgtgtcattcagatcctgaccggggaggactggaattcggtgatgtatgatgggatcatggcttatggcggcccctcttttccagggatgttagtctgtatttacttcatcatcctcttcatctgtggaaactgtatcctttgctgctgccccccacccctgcggcccccagcccccagcctgcagcacagtgccaaacgggcacgcccctcaggtccgggcggtcctgctcgggctcacaccacccagcctagaaccccatggcggcggaggtgggtctgggtggaaacctgcagctttggcatgggtgaggttcaccttcctgaaccctccgggcccgcagcggcgccgcgctccgggcgggctgtcgccgtaatctgggtgagcggcgccccctggcgttgcggcgtgtgcggccactcacaccgcctgcgatagggacgcgcgggagcgggccggctgccctggggccgcggcgtctgctcagaggcgggacgctccgggagggaggatgagccgttgtccttcaagtgaccttcagctctcctcctgctttttggtcagcagccctctctctgatgctgctctccaggactttagtcacgggcagagctgcacagacttcaaacagccccaaaagctccttcctgatcccggctggggcaggtttccagggcacaagccacgggtgctgcttctcttccccagctcataaccccgagagagtcacgtccagagccaggggtaacataggaacagctctgggccaagtcccagctaaggcagtgcagaaaacacagtcatggaagcctgcagacaaggtttcctcttttcccagctggatgacctcttgcagattgaaggtcctctacctcagtgtctgtaaaatgtggcaatggaatcatagaacctactacataaagggtcgttgggagttttcatgggatcatgcatgcaaggcctctgccacattcagaagccaccctggacaaagcccctcttccccagcctgggttgctgcggcttccctgtgtgtgaaatgatatgaatgtctgggtgcctggggccgggggtcagacttcacagacttaaagcccccttccagctatgctttcgttgattctgcagttctctgacccacagtgtttctgttggtggagtggggaggagaaagggcaaagaactgtctccactgggaactcccaagccttggctggctccagatggaccctccaagggtcttcgtgggtgcaggctcacattaagagttggcagagataccaagccaccccctcagcgcccagttataataaaccgctcttaagagcgttctgcatcctgctagagacaatgctgtttataatgtcaattacagccagtcatctcagcagggaaagcaatcatgaaacccagcaattaaagtgcaaggcagggcttgctgcctccctcccgcctgctccagtgtgcaggctagcctgttctcatccctcttgatagctccaggtagctaggagggtgatggggaggaaggggaggggaggaacactgttggggtctgactccctcaaattgcttccccctcaagctctctctgctgaggagctctaccctgcacgccccacatcccccgtgcccctgtgcccaccaaaaccccaaaccaagggtcattttctttaagaatggacacaaacagatatcctactgaatgtgttcttggccattgctgtggacaacctggctgatgctgagagcctcacatctgcccaaaaggaggaggaagaggagaaggagagaaagaagctggccaggtaaccctctaagcttgcccaggcctggggctccagggctcccattgtggaatgtcttcccactggtggcagagagaggcttgactgctagcctctgttggctctccctcctaggaggactctgggtttggggcttcctaagttgggcctctctcctaattcctaagcatcactctggtagggaccatcatgaattataataatctctgcaatggtgtcatattctccacctgctgggattatcttttgagaagctgtgataggtggcaggagtgtagggtggggagagagaaaggtaaccactcagttgggaaacgcagctccagcttacagagggagtcctcctcactactttataattcatctccagtgttaggaaggcaagacggggccctatgttgtatcctatcattatctagacgggacagttccaggccacacagctgccgggcactgagcagagctcctccaggagccaatcctagatgagatccaccatccttttctgctttggcgacccaggcatctctggagctgcaagaggccaattgcgtgtcaggcagagcaggtgtagctcagccccatagcacttgtgactgagctgcacacgagaagcgtcctggagaaaggaagatggactcagacccaggggatctgtcccctctggccccaacaggccacagggcggttccctcctacactgttccctatcactccagtaaacagccatttatttttttctgctgctgactggccaggactgccagcccagagaagaaacaagagttggtggagaagccggcagtgggggaatccaaggaggagaagattgagctgaaatccatcacggctgacggagagtctccacccgccaccaaggtgaggagctgtctccttcctggagctgtgaggccggtgctggggagggagggccacagccttcccaggccagaaccctgtggagaagaggagagaaagaaagacacccagtggaaagaaagccagtggggatgaacaggagagctgggagggggaagataaggcagattggctggatcccagccatctgctgatgtcttgaaggagatatgcaaagtgacaagtacctatttttgagctaagtcactgactaaaatgcaacttcaaggctactgcaagcctcttaacttggggacgtatctaactattcttcccccttctcccctgtgactgtctagatcaacatggatgacctccagcccaatgaaaatgaggataagagcccctaccccaacccagaaactacaggtaccagtcccactgcctaacctgggattgggagattgggggcagagatctaaattctaaagccacgtgggagtggccatatattagggaccatggttccagtgtccctctgtaagtaccttccactgctgagtgtcttctatctctatatttaagcatcatcagtcagcatctgggaggcaggtttgtttctggtttcctcataatgagatcacatttgagcagtgcttttgtgtcctttccaagttggattcagtgtacatttaaatttttgttacattacatgttgtaaaatcatcattaatttatataatgtattagtatggcatatgttgcaacattatgctcacttaatattaatagtcaatcccaagtctgccttgcccctactcaggaggcagtgccgagtgcagggacagctgccaccacagatgtcccacttgttgctttaggcaatgatttcaggtctcattataaaaggcgcgcttactgactccatctttttatgcttctatctgatacctaaattggcaggcagtctgcttctcaagagctttaatgtcagagatcagaggtcctccctccaggcttcacttccctgctccctgaaatcccataccctgtgcaaggcctgggcttgccttcctctgacctaggattgcagatattatcgccagtttcaagcttgaagtcaataacatgctatcaagggactgttgattttactgacatttccttgttcctgtaggttaggctatatttgggttgttcaccaagttaggtggctgagaacctcctacatttatgagcaaagctcggtttccctttttgctttccctccgctggttctctgcttagaacactcacaggcatccttgggaaccagactccctgtggtcacaccatcctcactcccctcctcctgcaagggaataggatgtggtttcctggagcttggatagaaagaacaggaagggcgttttcatatgcccggcattaaggctttgaagttcttaaaaccccttctagggtgaaaccgttagggaatttcaacgacgtactagaattattgaacaaatgcaatgggaggatcttgccttgatcctgaagcaacaaatacactttaaaatgacgttttagagggaaatgggggaaattgaatatggactgggaactaaatgattgaaagtagttttgttaatcttgttggtataatattttgtagttctgtttttaaactgctgcagtgtttatggccagagtctaaatgtttacgagttgctttgcttttaaaatattccaacaaaaaaaaaatggggacagagaagataaatggaacaagattagcaaaatgtccaaagttgttgaagctggttatatatatgaggtttagtatgtgagactgtactcttgtgtaaatctttaaggtttaaaatgaaagacagtaataaaacaaattccttagagccctgagaagagccctcccatggggccagcctccaggatgggcctccctgcacacacaacagggcagatctagcatgagggtcttttcacacaggcacccagctgcagccaggcctgtacggcagatacacctcttgcatcttcaacaaaaatctcaaattctattaatctatactcttggcttttcttttctttgttgctctaatgaaatcaaagagaagaatgttaattttaaaaaaaaagggctaatgaggattttgtcaccaggtcggccatcctagaaatgcctctcacgtagctacccagtggctctgaggactgggggatgcttacgctttccagctgaaaagctcttcccaccctctgctgaggcctcaggattcttgagatttttgagtgtacggcccgctccccgtcatttctgttggttacatgtgtctctttactttcgtgttgagacctctggtccataccctgaggctgccctgactgccccaccacgtacaccagccaccactccggcctctgaagccagccccaagcatgcccatttgtgcactatccctggtttccaggtcctcatccaggaggtccaaagggcagcatgctcttaaagctggtggccccacacatcactctgcccccaaaggctaagttagcttgtgcttcccagctcttcctgccttcccatttcctcccttccctgcctccacagtcagctcctggatcctttagtgccaggtgcagcagaagttcccagagactcctccgaagatcacgtggcctgttgtctctgttctggtcaatctctggttccttcctgcttcttgttctcccgaaccacgaatggcaaagatcctgatctaccattgtgctcccaaccgctgccccttccaggccgctggcccctgccatgcctggttcatgcaggtaccccttagcaggcagcactggtgagtgtccctcctgctctgccttcagccagaccactagggagaaagggccggtgtcagggagcacactgccatgctctcctgctccctccctgtctctctcttgccctgtctcctaggcttgccccctgccctctccctctctcctgggctgtccagattgcacccaaagtgatgtatcagagtggccaagtgggagctggactccagagtgcactctgctggctgcagcttcaattaccctcgcatgaccgcgaatactcagaggaggggcctgtttctaattcaacaaggggccatcgaggccagccatggccctagaatccttccctctctgtttcatctgaaaagctcgccagctgctttcaacctcccagatcggtataccctaattatagagaaaaacccaactcactgaaaaggaaagcattgtgcccagatgagtggaagctaattctacttttgtttaatttattaatttatttgagtgagcatgcagatgtttgcaagagccactaaggacttaaagttaacaggtacacactaaaaaaaaaggagtgccaccagacactgagtagtcagcaccgcctgtgctgggggaggctttcattgctgcagagggttcaaggacaaggagagccatgaggtggtggagtctgggggcttcatgcagaagggtggtcttgactgagctttgagtcagggagttggagaggctgaaggagttttttcaggatcgtacaatcatcagagatgctgagagttgggaggaaccttgtagatattcatgaactactcatgaagcatttaatgtgtgccaggcactgtgctaggtaccagggacatgggggtccttgttgtgggcaaacagggaagacccccaccctcctggaactgacatatcagtggggagacaggcagcagacaaaccaaccaaaaaggtgacatcacatgatgtgaagatagtaaaatcaaggattgtgttaggggatactcaggggtcaggctgctttgactgtgtggtcagcaaaggcttctctgaggacacagcatttgactggaacctgaaggattcaaaagaactagacatggaatcggagcgaagagctctctaggtggagaccctgagtgcagagtctcttacagggatgcacttggctgtggggactccaaagagggccagtgtgcctgcagcagagagaaccaagggatagtgccctgaggcgagaggccggggcagggcaggagggcagggcagaaggcgcagggccatgcgggaggctgggtctgatccagtgccctagagggccaccagaacgtctgagcagaggaggccctgacctgatgtccgactcaccctttcagagattccctctgagcggtgtgaataaagagcagtggtgttcgagagcagaatgggggcagggaggatacttgcgcagtatccaggcagagaggatggcagcttggacaggggatggtgccggagatgcagagaagtggtcaggcttggggtacattttgcaggtaggaccagctggattcactcacagcttagatgttggagagagggaaagagaaatgtagggtgattctgaggttttctaattgagccagcgaagagaaaatccccaatgcagaaactgtatccaccacctgtgctccttgtgccccaaggcactgctccgggtgtctggcccttaccaaccaggcactcccttcagctggtagcagactcttgcgccctgctagaaactaagctccttgaggacaagaaccatggctttgtcttctcagccttgggctcaatactctgtaggcactagatcctacaaatgtctttactttatgtggccaagagcaaaatcacagaagtgaggatgagcatcagatggaggggggcaagggttgccaaggaccaagggtggggctttgagtgctaccctggttttactttggaatcctctgacctgccttctgaaatgcagcagcaactccagcgtgcagcagcacctcacttccgatgcttttttccaaacctccaagaacaaaaattagaaaagaaagatccctaatgtattctactggcatttgggagtaggaggctaggtggttcagttgccaaccccaaaatgagccttgcctgactttccctgatctgtcagcatccctcctcatccataatacctgctaagcatcacgtgctgtcaaagttgtgttcctttacaaatctgagtttgtccttcagaaatcgtttcctcttaagtactgtgcctgaggttcagctgctgtgtgtctgaatggaccagctaacttgcttctccccaggaatggagctcagcatggagcttcataaacgggggggagctcgtgcagatgtaagagcctgcaccgttttccattaggaagttcgaatggcacaaagctatagtaaatatgggtttctgtaaacacaaatgattaaaataagcataaaattacctgttatcaaattatcatgaagaagaaagtgttgggtcatttcgagcaaaactgaaaagaatacaaacacctaggcaggaatttaagatccttctcaattaaatttcacttgaaataccatgatttaggccaattctggttttacttattcgactttaagtagaagacttttcttttacataccaagggttgggtgtcacaagaactccaactcttgtcctgtagacagtttttcatcttgggcctctcttctgctgaaaaaatattaattgtcttgctggtcagctctaattaccctagggaaagaatctgattgatgtctgtatggtactggccctccaaaaaagccttgggtccctaaatgcttgaatgctttttgcttgataaagaattgctttctgtgccaggcattttttttttctttgcagtacctggctttgtttgaaccagaagagggagaacatgcagaggcacagctgtgtccatgagacgagcatcccataactatctttctccagccagactagtatccccttcaccttcatcttatacagagtccccttccttctgaccggtgtggaagttcaatcatcatcaagaaataagggcttctagtgccaggcaaagcttttctttccagggttttcagcacatagggagaagggacagacatttaaaatcagtcatcaaggtactggaggcagaggttctgctgggatccatggaaaggtcattccctggagcgtgagtactcaggaaagttggaaggaggatgctatctggattgggggtccttgtgtgctctgcagagagggagatgaagcgcagctcaaacagagagagagagagcatgaggaaggacggagcacacagtgagcttgtcagctcactagggctgccataaccagtgaccacacactgggcagcttaaacagcagaaatgcatccttttacagttctagaggctggaagtccaaaatcaaggggtctgcagggccaagcgccttctgaaaggctcttgggaagaatcctcacttgcctctcctaacttcttgtggttgccggcagtccttggcttgtagatgcatccctccaatctctgcctctgtcttcacatggccttcttccctaagtgtgtttttgtgtctctgtgcctgtcttgatgaggataacagtcattacatttagggcccatcctagcgcagaataacttcttcataaccaattacatctgcaaaggccatatttccaaataaggtcacattgcaaagttctaggtaggcatgagtttgcgggggaaactgttcaacccactgtagtgaagtgctcagaaaatagtttcgtgtgagtggacagtttgttagggaataataggtggtaaggatctgactgagaaagatgttgagcattaatttacaggcttcgagtctgtcccataggtagaggttgtaataaaagcagcaaacacttacttacagagcggctgctatgtgccaggcaccgttctgaggtatagaggtactgttattattattccaccttagatggagaaactgaggcacagagagactcaataaaatgcccacggctagaaagaaacagagccaggattctggtccaggcgattggctggagagtctgctcttcactcccatgttgttactttcccctctgagcatcttcaacacatttgagcagcccaggatgggcagtgcttcccgtcatgagcgttgtgctggcaagcacaggaataagctgtctgactttggtccacattaaatgtggccactggctgggagaacgaaggcgcttctttaattggtgtcagtgtctaaacctttgcatgaagggcctgctgtggtcagtagtattgccctgttatctcgacagcacatgaatttttttttttttttttttttagttgcagaaattgggaaagtgttggtttctaattcctggaacttccaagagtgaggttatttgcaagggattccacaagccaactcagccataccctttccccaacctgcggcctagatagatgagtaacacctggcagtgccctgtcctacctggtcaccttttttcataccttacaactaggatgaccaacgaccccagtttgcccagaactagggggtttcctgggatgtgggaattttagttttaaaaccagaacaagttggtcgccctacttacaatcccccttattgtgcactgccagatacgacttctccagcagagatgagctgcagcagcacccacagggagacagcagaatgtctgtcttggttggtaccctacattttcagagccataatcatgtctgccagtaggaaggtctctgaaagtggtaaaataagtgggagtgctggagttatttagaatggtgctgttcttcttacaggagaagaggatgaggaggagccagagatgcctgtcggccctcgcccacgaccactctctgagcttcaccttaaggaaaaggcagtgcccatgccagaagccagcgcgtttttcatcttcagctctaacaacaggtgtgcagcaatggtggggaaggtggggtcctgctctctctagtaccagcctggcagttgcctgtattttacctgaacctctggatggagactgagactctcccagctccttgcaaattgtataaacaggcactcatttagggaagagtcctggattttgaatcagaagacttgtgtttatttttctctccactttttgaaatgtttaaactctatttctattctttgggtgattacccttgataatttactaattctatttaacttaacaaaatgtgatgttaaacaatatcaagaacctcctcctgtataatagagtgaccttagactattttaactcactcatctgctccttacttacatggaattgtcgttagtattttagtccaacttttatttttaatccaacaagttagtgagtcttactgttatatagatactgtgtgtttggatatatgtacaccttaccattttatttgttcaccatttttttactcatttcagtccatcctttagctagcattttctttcttcctaaagtacattctttagaggctcctttagttccgtaatggcaaattcagtgggcctctacttacctataactgtttcacttcttgctcttgaaagatagttttgctgtgtacacgattttagacagacaatttttgtcctgcagcacaagaaaggtgttattccactgtaaagtcagctgtcattccaactatggtttctttgtgagtaacctaacgtttatttgtagctgcttttaacatattctgttgcctttgtggttgtacagatttactaccatgtgtcaaggtgtggatttctttccatttgtcttgcttagaatacattctgcttcctaagcctatgtatttagatttttattcagttattgaaaaagtacagccataatgtttaaatattgcttctttttaattctatatttcttccttctgacactccaattggacatctgttagacattttcattctgtcctccctgtttcttagagggtcttacatatctttcatctccttgtctttctgtattctgggaaatttcttcaactgtatcttccagtttcttaattctattttcaacttaatctatattactgtttaaaccaattttttatcttgaccattatatgtttttgtttcagtcagttccatttgttgcttgattttccagatccatctctaaatctagtagtttctatcaattcctcatctttgtgatttagtcctttatttcattaaatatttcaaatatagttgttttatagtctatatctaatatttccaatacctccagtctttggaatctaaatcacttatccagtgtttcttcagatttcccatcttaggggcttgtccttttgtgcatctgatgatctttgattgtgaccccaacacttcctcttcatttgtgagagtcctgaagacctaaagtaggtctggggagactttcttccagatgccccttggaggtgttggcttggcctaaaattcccaggctttcctgccccacctcaagactggcttaacctgcaatttcttgacagcactgctgttattggcttccatcttcaagcaattctgccctcctggctggctctctctccatacgtagcctcagctcagtggaggttggtgggaggggttgttggtttgaagcagatgattcttacagccatctcctaactcttataaaccagaattgtctgagagagtttggcccttcgagggtttggtgcttctgcagcaggagggcttctcagagcatttagtcaaccataatgccaggagcagaagtctgaaggcctgggttgaagccctgactctcccacactaaggctgtgtttctgggcaagcctctcctacttgggtttcagtgttcttacctgtgaaatgaagatgatgacacccatcccttccttcctacattgctgtcaagatgagatggtgtacaagacactttggcatttaggaacctagcatttttggtgctatcactgagtgcctagaagctcagttgggtaattgtgctggggcatggaagtgaattgcacatttaaagctattacacaggagcagatcacctacagagagccggtttggctggcctctcagcatacccagctccgggtagtcctattgtgccttatgcataagcatagagttgatctcataaagtgatttcttttcaatgatagggaaaataagtccccaaacaaaagccagttatgaatgtcagagcaggatttgggaattcagagattctcaaaggtctcagatgtaaccttctaaaatatcaaagatgatatgtgcaccatgggggtgagcagttgtcattaccaagcagcagtaagacttcagaatgaagaggtcacttcaggccaacaagcacctgttgccagctgctggggagagctgaggagaggggctcccaagagccgactggtgcttccccttgtctgccttgacttgtctctcctcctgtcccctctcccgtacaggtttcgcctccagtgccaccgcattgtcaatgacacgatcttcaccaacctgatcctcttcttcattctgctcagcagcatttccctggctgctgaggacccggtccagcacacctccttcaggaaccatgtatgcatcgcctgtgtcttctgcactccttccccctggggctgtgccaggcccacagcttctgttgctgacatcattgttcaatcaggagcccaattctaggtgtcataattagatccacaactaacatttcattaagagagtagggctttgatagaaaaccaccctaggaccacaagcaaataaaagagcatgtacccaaatgctcaggctggtttgataattggcaaagatcaggactttcattgcctgtggatgttccccaggaagctctagttccctgcaaacttagtaaaatgtggccactgactacatgccctcccttgctcccagcatgctctgaccagaaggggagcattggcaaataggtgccaatgatatggctgaccttacctaaaagagagtcttggtacctttggtagagtagaaccaaatgtgaggacccacccaaggctctggtgaacaatattaaaggccagtttaagaattgctctatctcaaaacctcaaaactttgtcaagtcccaaccaagtgggcatgaagacagcccgctgatctaaagccatacccatgccaaaccactctgcgctcctggggcctgcttggtccagggctgtcttaccgaggttagcaggtgttggccccatccctgatccatcacctgaaatataataagtatgcagtcctggagccggtcctcagcctgtgcagacctcacctgaaggatgcacctcccttgccccagaggacataacccaggaatagatgtccaccatcacaggaagctggccagctcagtcccaccaacgtgagcgaagcattttgaatctccctgcaaaaagacaaaccccattctctgtccttttgacaagtatcttagtggtctgatttgggtttgtaagtaaattggattaatgggaaaagcatccaaccagatgctgctcagatccagtaccagctgaggcatgccctggaagctcacctcacttatctgggggcttcaagggaagccgctgtgctgcctgaggctagccccgcctcaggatgtctgtgtgtgtgccgcttgccccccatgtccatctgtgtccctgtgcaaaggcttaagtgccaggcatctcattttgaagtgtggccccttttctggtgaacatccactgacctctcttcccgtcctgcttttctcccttccccatcccatccccaccctgttcctttttgttttgcagattctgttttattttgatattgtttttaccaccattttcaccattgaaattgctctgaaggtaaagcccccatccccttctgctcctcctgtcccccttgtgccagcaccaggtctctgccgctgtctgtcgctaacacacatgctccttcctgttggtgtggggttcactctcagagccactaatccaattatgcttatttttcagatcctaggcaatgcagactatgtcttcactagtatctttacattagaaattatccttaaggtaatgcaacctgggcaatgcatcctctgtcgctttctttgtctatctctgctctgtgtggctggatcttttgtcttttctgtttctttcactctctcttttctttactcccaagcctgaaattggaaaaatgagtgcccctcactttgtgtgatgcactttgcccagacttagaagccaggagcagcctaccccaccacagctcctccctccagccacccctaagcagtccgtggcctggaagggacacgtgttggctgtgccaacattaaggctgccatttcactggttggggctgcagccgtcagcagcgccagacatacatgcccacatgcaccagctccggttaactgatacctgagcccacgtaggactctccttccctcctcctgcttcatacactctgaaagtgggaaacctcctggggcgtgaaagaatcacttgagctactctctttggatgcccatccttagcaccttcctcagtacttgcagcagatattgggtctaagctggagttggggctgtgtcacagtgatcacaggcctactgtgagatgtggagctggtctcccagctgagggcttttagcagggccattacagactactgccgaccctcagtcacctgctgcaaagctttgtcacagtgccccttgccctgagcgtgggggagggagaattgtgctggagagctgagtacagcaggatgagagcaggtgccgcaaggaacctgagcacccagcccccagcccccagcccttgcctgctgctggcccagctcagttctgctaagggaactgctgcaacattgctaccctcagaacaggcagagcccacctcagggcaacactgggatgagagaaagagtattcctccatttttcgggtatatttctgagtctctaaaccaatgcgtggcaagccagttcatctgagagtcagggtgtgagttccatgacctcagggaacgtgtgctcctctctgagcaagggggtagattctaccctttccccaaacagaaggactaaggctctgaagcccatgcttcagctttagcttcttcctgggagactagcctgggactccccctcccaaggagtccaggctcccttgtcatcctatcgctgtggccaatgcaagctgaagtccacacctaaccgatgccactgccagctgcaggcctctccttccctgatgagactccctcatcatggcccagcctgttgatggacaggacagttcagtcacatccagatacaaattgaatggggcagtttttatgtgccttcccctgtgtccttgtccccaggacactcaggtgcccccagctgccatccctggttcctgctaaccaagtatgtggctcagatttttcttttctgctcgtggagagtagatctgaccaggccttggttcctggaggtcgggagagggaaccgaaagttgcgtggctgcactaagatgcaccgcggcaaaacctgctttccatggtgagctgctttgcttcccggacttcagatgcagggaggcacacagaccccagagttctttcccaggacaagagacgctctgaggcccaattctcagtgcccttctacagagctgcccttgtggatttcaatggtgctatttctccttcgggattgccatacaagctgaagtgaaaggtctctttgcaagcattgtcatggcaaggtccttccatcccctccctcttctactttcttctatgctcagcatgcttctgaatagaaaccccaatgccggaacactcccctgtacctccttcccactgggtccctcttcccggcctaaggcccggtgtcatgtcatggcacagatgaccgtggctgtccaagggggacatttagcacaaggaacagtggaagggcctggaaatgtttggccttaaaaaggaaaggcttgtaggctcacaacagttggcctgagtcatacaaaggaccgtcacatagaagaggaagaaggcagaatcaagaccaatgagtagaaatcacaaaaaaagacaggtttcatagctagaagagctgcctggagaggcagggatggcccgtggttgaacagagagctttcctacccttccaggcagagctagcgagccacgtcccattcctttccttcctcaggatggaaacaccccagcaagggccccttcccaagtaatggtgtagaattaggaaagcaggaccgaggtggctggcaatcagaaaaaaagggtcaaagaggaacaattagcactgggtacctgagtctggcttttcctgatgccctgaacaccacagatgactttcaagtaaatgctacgttttccccatgtccatttgccctttcttgtacagccactcttcctctggccctgcctggatgcatgttcccaccgcccccacatgcacacacatgcacttgctcaagtgttggtctcatttgagggtccctaaacaaaacaggagcccaaaaccagaggacagagttggcactctgagccttattagtccacccatctgaggaatgcagagtgttctgttagagctcagtagtagcctcagaagatccaagccaggagcaagaagggatcagacccagtgccttcctaacactaaaagcaaggtggctggggaagtactgggctttctgcaggcacaattaatatgaattatgggagcctcctgagtccagtctgtgggggtcccagctcttcaccaagaggcagggaggcaaggcttccagatggtgggccttctagaactatactcccttgcatcttttatgtaatctacccacttctaaaaaccattgcccaacacaggtgcctgagtcctttgggaccccctgctgcaagagataaatggaaagaattaggttgcaagagctatttttgcccatttccctctgtgtttgcttttgaatggctctgcggacactctgccctgggcatgctctgattccaaagagatgaactggaccccagatgaccggggagccttgctccacctctccactgtcggctccacattttccctttggccgatgcttcctgtccgctgcctgtcacagcccttatcctggataaccactggcccttacgcaagtcggcaaaatgagaaaggctgtaaaggtgatttgttgagcacctgcagtgcgcagctttacaccaggctcagagggtggtaataatggccaagtcctgtagcagtcatcgtcatcttgtgtgttctctttttaaaagtttccaaagggctttcacaaagccaggggatagtttcctcaccttttgatgagaaaacagaacttttctcatccaggaagcatccagaattcaaatccaggctgtagtgacagctcacccttttatggggctcaccgtgtgcagggtggcatcctaagtattttacatagaggtacccacttgatgcttacaaccctgtagggtagaccttatcctcatttttccaatgaggaaacagaggcactaagagaatttgagtttcttgctccaggccacaaaaataaaataccacaggtctgggattccagcccaggccgtctggcctcagagcctgtgctcttagccactgagcctcatagcccctctgatcacacaacttttgcccttaaagaactccagatgtagtctagaagcaggacagtagaattgagtttagaatatttggcatcaataataagcaccctttgaggccaggaaggggaggtatgctaattgccagggtcaccactggaacttctcaccaggcaccagggtgaccagctggcctagtttgcctaagactgaggagttttctgggatgcaggatttctgatgataaagcaaatctgggcaaaccaggatggctggtcaccctgctgggcatgccccgccccccaacccacccactcacggcagatgtctggtgctctcagctggcctaaggactcaagcatttggagaggcagtcgggatgtgtgctcccaacccgacagcatcaggaaaggaccctgcaggcccaaagccatggacttgggatgtggaacagtgcgaaattagagtgggatggtggggcccacttgaaagggctttgaatggaggactaaagagcctggcttggcctggcaggtgcaaggagccacccagcagtcctgggctgcgagagtcttgggtggttgtgtgcatggtagcagaactcttttcttggcaccatagcgccgtctttgtccttcctgttccccatggatggtgcttgggacttgcccaagggatgctgtgggaggaaggggtggtgtgaggggtctctgggctagggctagggccactcacactggtgttcctttgtccctccctgcagatgactgcttatggggctttcttgcacaagggttctttctgccggaactacttcaacatcctggacctgctggtggtcagcgtgtccctcatctcctttggcatccagtgagtgggagcccctcagcccacgatgggccatgcagctagcaaggggtgccagagaggacaaccagaccctggagggcctgcctgcagggccaccgcagtgtgatgagagtggggtggggcctccaaagctgtgcatggtggctttgggttcttggttctgtgtcctcagtggtctgatacttggggcacgttgatcaggtgagaatatgtttaattatctgggttttgccatgacaggcagggccaggctcagctattaagaaacggttgtctccaggaccttcctgcctcctccaccacggccccagtgccctaggctgaccttcagcaacccacagtctgccactgccgtgacctcccctgacctggaccctccttctccctttctctcccctctctctccagccaaagcacctcatgtatgagtgtatgtgtgaatgtgtgtatatatatgtctgtgtaagtgtggggtgtatgtgtgcacgtgtgtggatgtgtggggtgtgtgtatatgtggatgtgtgtttgtggctgtgtgtatgtgtgtgtatgtatgtgtttgtgtttgtgtctgcatatgtgtctatggacgtgaatgtatatgtgtatgtatgtgcatatgtatgtgtgagtgcatgtatgtgtgtgactgtgtatatttgtgtcttgtgtgtgtgtgtgtgtgtgtgtgtgtgtgtgtgtgtgtgagtttttcatttcactggtctggggtacagtctgggtgtgagttctaagagctttccaggtgactcccctgtacagccaagcttgcagtcctcgttcaggtgtggaggatctgattaccagtttctaccaagttctaacagctgatagtgtgaatcctacactttaactttcaaagcacttccacatacacattcttctgtggtcctcacacacacaaaacgatgggggagacggggcaagtgttatcatgattgtatagatgggaaatttggagttcaggacatcatgacacttgctcaaggtcacacctgtggtagagaaaggcctaagtcccagcgttcctgggtctctcctcccaagagtgttttcatggttggctgagatcatgcagggaccaggaccttgggagagacccttttctgtgatcatcagttatattaccccatattttctgcctgggagcctacaagtccagatttgaatcccagcatggccactcagtcactatttaaccttgaatgaggaattcctcctctttagcctgtgtttttcccatctgacctttaaatcccttccattgtgattcggtgcaaactgactccctcccagagagactgtaggagagacacagtgatagataggaatggcctttgcatctcttggaataaaagagtcatgcaccagagaaatcggatctttccaccagccccttgagcacatcatcctgaccacacaaagcatgaaatcagcgcttgctggcctgtcattcattgtttaggtcccaagacaagtatgaggctctccaaaagcttgagaggctatctcaggtagttagcccgtgagggttaggatgtgctccatagctgctcaccaaggtggtatggttaatgagccccacctgggtaggatggacagctccaaaaaccatccaggcatcttgcttagggacctgtctcctgctgtctccattgcactagggaaaagccgtagcccgagactccgagaagctctggcttggcctcagcatcccaggtgtatggaacctgtagtgccacgtaggagccaaagggactggccttctgaagggtcactgaaaaatcaactgacaaaagaaaggttaattggagacaaagcattcacatttatttaacgtgtatacacagagcctatagaatgcagacccaaagatacaggggaaactgaccatttttctgcttaggttcaaaaaagtatggacagccatgtagaaatgtgattggacaagaagcgtaggatctaacgtgaatggaccgagtggggaacccagcaaggcctgtctctaggttcttcttgtgctctctgtgaagctttccctccttctgggtcggggcaggatcccgtctgcaacaggagtctgaggatctacactcccacatggtggatctggtcattttttatggccagtttttatacagaaaaggagagggaaattttgaataatattttaggttgtgtggctggctttgaggaaacggggttctgggttctggtttctgtgacccatcttggggaagagggattctagtgtctatggctagcctgagaggagaaggggactgagacaggagggcaagagaaggtcagagaaaaacttttgcttctgagactgcttctaaggccgtcgtttcggggtgttgtttcctgagccccaacagcgaagcccatccttccttggagtcctgagtgtgctctgggtgggttttatgtttaggtgtcaggggcaatatgtgtttggagataaacactaagaaatctcctccccatgacatcacctccagccacaaggcccgagatcccaccgttagtacggcattcctttaagtgtagtaacgtcttcagcaggcctcatgagcaggtaccattcaggcagtttctcaagcacatggctgggtgatttacatagaattcttatttaacccttgcaaagaccttctgagctgattacagacccattttacagataaagaaactagagctcagaaaatttaggaaatttgtcctcagtgccttggctagcaagtgcctgcactggggtctgaattcccatggccttgctctgaatttctttctgtgacactgtgaatgcccctgtgagtagcacagtacattgctaatgacctgccatgagccaccttgcatattatttagtcacccacaggaaagccccagggttacaggcaagctccaggctctcacgggatgggagacaggagtagagagtggtcccagaatgcgaacatccccaagatgggctttatgttttctcaggtttgcctcggattcacctgtcaggacattcccttaccacattatttttgctccccccagaaacaggaggagcttactaccctgcctgtttccctctcccaggtccagtgcaatcaatgtcgtgaagatcttgcgagtcctgcgagtactcaggcccctgagggccatcaacagggccaaggggctaaaggtgagttgagggcttgggtagggagtctccagccagcccattggggagtgggagctccacagaggtgaggggtgggttggaaggagatgatggtcagaccaagtggctgccatgtggggtcccggacactggtcccactgcatgtcccggttccgtaatgaacagaatagtaacagaggcagccatcccaagtgtctgccctaagcagaatgtgccaaagggagatcccacacaaaccctgtgcccctgtggtgccaccatccctatattccttccactgtaagatgggaggttggcaggacttttgtccttgtagtcacggagagtccagtgggggcctttgcatcccattagggtccatcacttcccatgtgactttgggagcgtggctttgcccctctcagcccaattactccccgttgtggcaaacgggctgcccctgctacctcctggaaaggctcctggcatctcctgaagccacgtccctctccccgtcccttcccactgcagcatgtggttcagtgtgtgtttgtcgccatccggaccatcgggaacatcgtgattgtcaccaccctgctgcagttcatgtttgcctgcatcggggtccagctcttcaaggtaaagtctgggctccgttgtggtcctcctacctcccctcccatcagcattcctggggaagggaactggcagatatagtacaaacgagacagtgtcctgagccagacttggcttggatataacctccacctgcagcccgactcaaccttcagaccagggtagggaggcgctagaaggaggcatcgggccaccaggccagaggcccctcaccctctccacttcacctgcccttgaggtcactgcccttccttctagaaagagagagagagggactttcatcctgtggaacctctgtgtcagtcagttgcttaaagcctgcagcggtgacctattatcaacagcatcacgtccccactgcaccacccagctttcagagccctgcacctgtcaaagtcagctcctgctgcttcctgcagcacccctcgtgtcctccttggattctggtcttttttgccctcacccttttagttctgctattctcccacctagagcattcgcccccgctcccctccactgtgtaaacgcccatctaattcatccctctgagcccagctccacttctccctccctggcgagacctccccggagagtacagctcccatggacccgagctcctgtttttgcattgcagtgctacttgcagcactggcgtctgtattcgccaccgttctgtgcgtgtgagtcaggtcctgcccatctggattctgcactttttatcccactgtccctagcacagtgctgggctatggagatgctcactaattgcttttggattgactcattgattactgaacatctctgatactctgttctctgccttccagggaaagctgtacacctgttcagacagttccaagcagacagaggcggaatgcaagtgagtagaggtgggagggcagccagggccacggccggtcagccccaggaggctggaggcttgaccagaaaggagggacagctcattttctaagactgcagtggcacctgcgctctgcctgtgtgtcatctggcctcacggacacaatgtgtagcattttttgttcctgaagtttctgcccactgaagctcctcccatggctagaacggtgaagttcaagccaggcagtcccatcccacccagcattcaaggtcactggcaggccaggcgtgaaggaagatgggagatcccagagtaaactccttctcctcctctctcaggggcaactacatcacgtacaaagacggggaggttgaccaccccatcatccaaccccgcagctgggagaacagcaagtttgactttgacaatgttctggcagccatgatggccctcttcaccgtctccaccttcgaagggtggccagagtgagtatgcaaagcaaggccccacgagccctgacattcaagggccagtactgactttccagcccatccccaagttttgttaatgtcccgcactccctctggaggtcatatttacctgggtcctccccaggcagtgaggtgtatttctagaacttacagtccactgtcactgctgaaaccgactcttctttctctagaaggtgtcaagaaactcccaccaaaagtgacctttttttagccctctttccaacctcagcatgagccacgatgtcagagatctctgtcattacccttatggcatctgggagttgggtgtggggagagcttctccaggtgtgggccctgtggtcaccataggattcaagattgccactcccagcatgcccttcattgggtaaagatggctgagatgtctttgttttatttgactggatcccggtctccttagaaaaagccttgcctgtatttacagtggaaagtaggaaagggatggaagcccgggccccacttcctctgcagaggcaatgcgtttgtgcgtagagcagcccgtgggccttgcacgctgcatcacctctaccaggcagcttcccatcagatccttatatctttgtatagatacctgcttttcccccaatatgtattccagtgaaattagaatctgaaagtcagaaaattctaaatgtttctaagtcaacagcaatgcatggatcttaggtaagagtcacattattatgtggtaagatataggtgatagctggagaataaccaagtgctgtgcagggctacagaggaaggggaagagataatccctgtccatgaaaaataacaagcttcatggggcacacagcccaggctcaaatgaatggcatatgtatgtaaactgcttatgtctaaaaccaggccattggtgatgatcggagtagcatgggtcatgtgagtgtttttatctaagtggatatttgctctcggagagatttattttacattccttctaacattctctgagctcatgccagtttgcaaagctgtctcaatatttaccaatatttccagtgttttaaatcaatgtccatgactcatgttacatttaaatagctcttcacagtttcaaaacaccttcctatacattattctaactaccctgcaaggtaggaaagtcaggaattattgtctccaatttacagatgaagaatctgagtctcagagaggttaaacgctttgcccaaggtcacacagccagtaagaggccgagctgggactccagcccagagctgtctcctgcaccctgatccctgggatccctggagcagtggtgccgtccttccgcagaggggaccctgcttctccagttccctctgtgggacctgtctcctcctgcaggctgctgtaccgctccatcgactcccacacggaagacaagggccccatctacaactaccgtgtggagatctccatcttcttcatcatctacatcatcatcatcgccttcttcatgatgaacatcttcgtgggcttcgtcatcgtcacctttcaggagcagggggagcaggagtacaagaactgtgagctggacaagaaccaggtagcttcctaggaaggagcggagggaagcggggcccacggagggaatggcagcctgcggcccaccccgcagaggggctgcgacagggagaggccgtgcagatactgagatcgtctctctattcctcaaccagagtgggctgtcagtctttttgagggacctgtgcaaaagaaatgcaaattcctgcaaaccccagatctggcaaatgtactcagccaacaaatatctatgaagcttctacttaaggatactctatgataggttttgtcaaatctcatgccctatatagaagttaacaagttagagggacccaagtgggtcggcaccatgatacggaggagagaaactagaactgtgagggagtgagggcttttggggtggggaacagaacggcttcaggaaaccactcttacatggtttcttaagtaaaacccagaggcttgtgtgggaggtgggggcaggaaagaggcttaagtgggagtgagatggtgatgccaagtatcgtgacaggttctgttagccgtgaagagctggcagtgccgtggctgagtcaggaagctgtcgtggtgggaggtagatgtagtgcctcaggtctgttccctagctcggctcccactgggaggagtccgtggggaaacacatccctgtctgtgaataaggagtgcccacgggcaggagcgcagcgtggtgtgctccttgtgaccctcgccaggccagccagtcccctgtgggttttcaagtctacatctcaggcatagactcactctgctggctgctgtgtggaccctggattgaaagaagacaggaaagagaggaggccagttagaaagtggaaatgagagaggattagaccccgatctagtatccggttaatgatggtagcgatggaaagaataggaggaggtaaaagcgttaagactcaggcgttggacaccggggctgagggtttgagaagaagctggggacattccccagttcctgatctggaagcctgggcaaagtacagagaaatggactggctctttgccagagtcccaagaatctagttagcccagaatctccttccctctcagtgaactgtgtttttccatcttatggacactggcaaataagaaagattgatttagttggccaggcacagtggctcatgcctgtaatcccagcactttgggaggccaaggtgggcggatcacttgaggccaggagtttgagaccagcctggccaacatggtgaaaccccgtctctactaaaaatacaaaaaattagctgggcgttgtggcgtgtgcctgtaatcacagctacttgggaggctgaggcaggagaatcgcttgagcccaggagatggaggttgcagtgagccaagatcacaccactgcactccagcctgctggatttaggacaggaaagaaaaactgaggagagaagtacccaaggagggtctgtggcatgggaagtaatcagtgagaagcacagctgtcagtcggtcaggaagcacattcttagcgatgccgactccctgccgaggcacatgccaggcatcaccagggtgaggaaaggaggtgtatggtccctgcctaggaccttgttacggggatttgacaagaaggggctctctccttgattaagggggccatggaaaaatcaagacattttccaaataacacctcccacctgtaagtgagccggagcggccaatgatttctcagacttccggagaaccccaccccacagtgtgtggtctcatcacatcccacacttctctgccagctccccccacaccctccagttaactaaccccactctccccatcctccaccaccctcccagcgacagtgcgtggaatacgccctcaaggcccggcccctgcggaggtacatccccaagaaccagcaccagtacaaagtgtggtacgtggtcaactccacctacttcgagtacctgatgttcgtcctcatcctgctcaacaccatctgcctggccatgcaggtcagtcccaggaggagcacagccatggtgctgcagaagggagtgtgccatggggatggaaagtgtaacggagcggcaggcagctcagtgcatcgctttcctggtcaccaagggaggcatttggagaaagacgagtgttctctgtcaaggatgtgctcctctctgggccttacggaagaatccatggcaccctgggttgatcaatggagagaggggaggagatggagaagggagggttgagctgaatgcattcattgttggttgatcaatggagagaggggaggagatggagaacggagggatgagctggatgtgttcgttgttggttgatcaatggagagaggggaggagatggaggagggagggatgagctggatgcattccttgttggttgatcaatggagagaggggaggagatggagaagggagggatgagctggatgcgttcgtttttggttgatcaatggggagaggggaggagatggagaagggagggatgagctggatgcattccttgttggttgatcaatggagagaggggaggagatggagaagggagggatgagctggatgcgttcatttttggttgatcaatggagagaggggaggagatggagaacggagggatgagctggatgtgttcgttgttggttgatcaatggagaggggaggagatggaggagggagggatgagctggatgcattccttgttggttgatcaatggggagaggggaggagatggagaagggaggggaggagatggagaagggagggatgagctggatgcattcattgttggttgataagtggggagaggggaggagatggagaagggagggatgagctggacgcattcgttgtcggtaaggtgtggcgtgtggagggaggtgggttctgcatccacctgtcttcagggacagagcttgttcccaagctctcttgagtgccagagtctccataaagttgtcacggccaaccagggaaatgaacacagatgtgttcagagatggcagagcagggaagatcttggaggttctcctgagtcctcctgactgcccacggagaggtgggcggccctctgggggtttggttcaaggaaggtcttgctgaggcgagggccttcgagaaggctgggcaaaaggtggggaggaggagcgacctccctgccccgtgttcacagctcctcccctctcctgatgcagcactacggccagagctgcctgttcaaaatcgccatgaacatcctcaacatgctcttcactggcctcttcaccgtggagatgatcctgaagctcattgccttcaaacccaaggtaggcctctgagaaagacctttgattcccaggcatcaggggtggacagaacggggaggtggggtgcaggtattgaaggcagaatgaggggaagagggaaaaaggcatcggtgaaggaccatccctgctccgatggtcagtgccccaactcctacacctgcccagagctgaaccaggccaactccaggaaacactctcagctctcagtgttgaccctggctggcatgcacaagctgcagattcctcgctgagctgaacctctgagcctctcctaggagaggcaggtgatggtctttctcctatgtcccatcctctagtacataacctgttaatagaagaaactatgctcatagactggcagaccaaacctctccaggcccagccccccagatccactcaggcctctgttccaccctcctcccatttcatcagccacacagaccaacctcatataaaacattcagccagggctggatttgctcagggctcaggactgagggctccagcccatgggcactcctgttccctgcctaagaggctatggcattgctccttacatgctctggggcaggaagaacaattaccagcaaatttctctgctttgttccttgtgtaagggcaagaagattaggcctgctgctgaatgaggcagggtcagaattcctgttctttggatcatctgtgcccttcctagccagtcacccccattgtcctcagtggtggaggagcagacactggtatgagccacaccttccaccctgggcctctgtagatgggtcagaatcacgggtatccactggccgggattcaccaccaggacagctgcttctgagggaggctataagagcaactgagcagcccccaggctaccataacaccttttggagaaggatgagaaggaacgagttctaggagcatcatgcagttacagacttgagacaatctctccagcttactgagccttcccctccctcctttggtagttttcccagaggcaacacagatcaacaggaggccaagagcaagaatccctggccatatcttctattttcattcaagtttttactggtctcaagattaattgggggtgggggagggtccagctcggcctttgaatccatgttcattgaggagatatccacagccttctttgaatgaatattcactcacactttggattccatatcatgtgctacatgtatatcatcgcacgtcattctcaaaacgtccctttaaagtaggtattagcatccctctgtggagaagggggaagggaggctcaaacaattaagtgcccaggattaattgatccactgctaagaactggcagaacggagactggaatccggcacctctgacttcactgtattttccaccacactgaggttaactatcattttcccatgtcaagtgttctgcgggtattttttagcaagagggaaacaaccttggagggacttaaaagataagacaatattcctacaatgcagattcttctgtcactcaaagaatgcctggggatcccagctgattttcatagaggaagtctcctaagggacatcctttggtgatagaacggtggtttcctgccttctccagagaagcaagtacactctttttcaccttcctgtacaagtcccatttaggaggacagatcttgtcctgacctagagaggacccctgcgttgccctgacaccttccttagggtacacggtgtctgtgcccacacatggtcctattccaagccctgcagcccaggagctctgacagttcgccacccacagcagcatgaccagctgaggccaggagtgcagtcactgcctagccgagcctcagtctcggatgactcctctcagtggggaaactggcatcattttcatacagtgtcacgagacatatggtttaaatatttcaaagccttgagtcattccacagttgactcagatgtgtttctgacgatgtctgaggcagtctggagagcctgcagtggactttctgaatcatgcctcctgagcacgggagacatacagacaaccttccctgggaagtgcatgaaattgacacctgcaggagcctccgtcctccgtctaaaagacactccacctaaatcctgccaatcaaggaacaagccagtttcctaggaagtaaccattgcgagtggtctaaactgtaaagtgcctcctaatttcctctgtccctggttttctattgtgagaagatggggcaagataacagagacttttacccaagaaggaagacagccatcctgggcccatttgcatttcacattccagggtacatctatggtgtaaagagaaaggaaaatggatctttccctgtgaatttccctaaaggggctctggcaagagggggataaaggtcaccacccagttaggagcatcatggagcacagctgagtccctggattcttactgagctatgttcttcattcacaaatagactccaggtaaagcagctccaaaattttcaggcagaaaaccaaactggaaaaacttgaagctctggaagaatatccagctggatctggcccaagaaccagtggcttctaaccatgacctgaatccatgacaactttcatttcccaccattaagtaggactctgtgctgcactttttatttcactggcatggttgtttgtgtatgacccagatgagcatcagcatttgctgtgaaaggatggctaggaaccaaggatgttgaagacagtctgaagttgtcactgcttatgtttcgtctctgcaactggctggttggttggtccatcagccggtcaacttgtattcttgcttcattctttcattgttttcatggtcatggatgttcccaatttcttcatttctgtgtgttctcctcaccactccatggaaaataaatttactcaagtaagtccctgccttaaatctaaccatcccactccttaaattcatactctgttcaaaaaaaaaaaaaaaatcacacaaagaaactaggaatcaacataaaccagtttagattgagtcggtccctgacaaagcctcaggaacctgcaggcatggtttgaagagagtgaggtggatcatgccagcattgatttgaacagtgaacagtgacccagaaggatctccttccctagaagtgagaggccatgacctggagataactggatggcccctgcaccccacacgaaggtgcaggaccaggctgggcagcacgaaaagtgctggctggaatattctgaaggtaattaaataactggatagtcctatcatgaactgaagcttgtcagcaaagacaggaaaataaattttgaagatactcttatagatttgataaactgaaaaatatgcaatgcctggggaaaaagtctaacagaaatggctaagatctctacagagaaaatgataaaattgaaaggaattcaagaaaagctgataactgaagacatctatcatgttcctgaattggaaagctcaatattattaggatatcatttctcctcaaactgatccataggctcaataccattccagttaaaactcccaattgcactttgctggaggtgaggatggcaggagagggagccacacgtaaatcctttacggccaacaggatgaggctgggtggtcctgaggcttcagccccttcgggcagctctgaggtcaccaaggagggaatgcacaggagcctggcgcgggaagcagtgtctgtctcagctactccagtgtcggctgctggtttggtagtgggagtgatgatgtcacttagttgcctgaggtttgctgtcgaggatgtctcagcaagggtactgggggggaggagctgcaggaggcgatgagtgagaggctgcgctccaagcttctcctcctcagtggaatgtggtatgccaggaaggcaggggttcaccccgtggaaggctcctaactcctcccctccacacaggctccacctgggccgcagaggggtgaagcagctgagactcacctctgcccctcagctgaagccatcccactcagggagtagccagtgatcacctccccaagaggaggacgctggaagggccttgaccctggcagctctctggaatccaagtctcggtctccctttttggctttcccccagcctgagaatggtccagaggggagaatggacccagagtgaaagcactcattggcccctctgaccccctgctttcttgaataagcagctgaaacctcgggaggcctggcccctttcccacacgttcccagtctccgctctctttctgtctgggcctcctcagcccagctgctccagcttcacaaagccagatggtttctctcatccccctaccctttcttctggtgattttcagccagaagttgacgcatatatagtggagcccctcttgactgggttagacagtctctcgccctggccgagtgagtttctcccactgtcagttgccccagccctccctggccttccccagccagtggcagctgcaagcacccagccctttccctgcagactctttcccacccagtcctgagctggccctaagaaggcagcaagcgcaggtgaggtctggagttagtcgctgctgcgagcccccatagggcgtgtcccgtgagccatggggcacccagacactcttttccacagtcgattggacttctgtctagacttccccatcagcattttattgccctagtgacagaaatctaacagccgtgagcccctctgggttcttagctgaccccctctggggtgcagagccttgtccagctgctggccagacttgccgcctcatggcctccatgccacttccgaagtggaggcagcctcctcaccacggctcctctccagacttcctgccggcgcccttgccctgcacgctggtctctgctgggcccgacaggccttaccacagccatctggggctgtggctcctgtctgccaccacacacaaaggacgtggctggcattttcagaggatcagctaagaatggggcagcagttcagttgccacagtcttgtctgctttgaagcccctgttatctttcaggaaagaggaaatgaaggcagtgaagccttggccttgtctgcttctcagagagtagagaggcagaaagaggagcggtttctccggtcccccacctgttgtcctgaggaatccatcaacgaggccctgggcacttcctttatcgagagtgagggatgagtcaggactagtcggtagcctggtgaatgagatgctaccagaaccagagctgctcgggaccctggaggtcaaatgctggctctctcttggggccactcttcatagcacagctctgggcccagccttgccccggtctcactgacacatatgccagctaagctatagggagggccagggggctctggaatggtcgtcctagtggcgagcacctggagttcgtgtgccaaaaccagcccactctgcatcgtgaaggctctgagctgacagaggctgttgctggccttggactttccacactcaggggcagccgtcctcgtatccagtgtgcccatgtgggggcagggatcctgtggcttccagagcagtcttttctctgcaggctctgctgttcttaggactggtttctgctcttacaaatgattcttggccctgacatgggtggccacaggccctgcggaggggagaaatctttggggataccctgaggatgtggctcaaatggaagggtcatcaccagctgccttgttttcactgggcttgtgtcgaaaggcacagatgagggctgagttggggctgtaggttcgcatatggatgggcagagggaaagttggaatgaggaggtgggtgcatggggaagttcacttgcttccatagagaaacaacagcccagtttctcatctactctgtcagctctgtccatgtctagaaacttctgtcctttagatttagcatctggcctctttgggcaaatagctttcgtcacatgacccgaagatactgtggtccctcctccagccagcttggggttctccaggggcatccatgccctgtgcagatgcaaggggactttggaggctgagggtccggattgctcaggtgtggacctgctgttttaggtgttggagtctgtggcgccaggagtgagctgctcccaggaaagggaccagattctgacattcccctggcaggtggagaagttgggagggcaccctcagcagacaactcagcccccaagtcaaaggtcagatctgcttgtctgagcaagggaagagaaaccacctttacgaactgtgggccaggcctctttcccacccaggccagggtgtcagtctggatggtaatcagacatgttctctgcccccgggaggaggcaagtggacggcacaccaaagaacaggctcctgaaggttgccaatggtgacagaaacagccacaggagaagagagtgcatgagcctgtgtcagagcagcggctcatcagcctaaggagaggtgtggcaaaggccacgaggccccaaactgccccaccggtgccctggggcagccagggctgaggcagtgggaagaatgccagggccagaattcctctaaagacaccaatgtggccacctgaggggccaggggaaccctgcaagctaaatccatcaggcctgagctgagcctgccccggaggcaggagagactccgatgtccacagactcttccatggactgttgagagacatttcagaacgtgttcttaaaagctcagtcaaggaccaggagaaggaaggggaagtgggatggccaggaggaaaggatgcacactggagcccgttcctctttttgaaagcggagaatcttctaggaacttggtttgtttttcagtcatgttttcggcagcaatgacattgctggctgaaatgtactttctctccaacttgacctctgcctccacctgcaccgctcaccaggaatcatcctcttccaactgttttaaattagccatgcacttctgtatgatgcagtaatttttgtgaagttttaatttttacaaagcaaattttgctttatgtcttcgcttcatcatccactgaccccagatcccacccagagaggaaattctggtagattgagacccaggaagcctagatcccacctcagcatcaccttgaaccagccagggctgagcagacgggacaggaagagcttcctacaagcacttgttccttccatgtctgtttctctgtaaagtaggaagactgccttagcatactgtggtgagactgagtgaggtcatatctacagaggaatgaaggcttcagggaaagtgccattcagatgaaactcagccggatccctacgcctggggagtttgcgcccagccctctaactcagcaccaaaggaacttcacctccagcctgggtgtgccctcttgtctgtgaccattttaaatgggcccttttgcaatattggtattctgtcgtctttcatcctgagcccatgtattctatcccttcagtctgatttctgtctcacaccatgaaataactttaaggctcatcttaatgcatccttgaagttgggttgtgcaagcatcaacgacgctaccagcatctaaactatcactcccctttcctgtggctaatgcaacccattagtcggcttttcaagccttcagctcagtttttcaccattccctctctttctcggtgcctaggccttgccattcttcgtattctttatttcaagaactctttgtttgtgtgacttgcttagtgttttgctgcaggctaaagttcaccaacaacccccaaaatattttgttgagcagctcacgtgctaggcggtaggcttggtaccagggactcaatcatgaatacaagcaggtaggtaaggccacacttgcctggggcgactttggcccactcttgagacttgtagcatccccagttcaccctctcatttgtcactaggaaaactcctgtcagctggcattcatatttcaacttaaaagaagcagtcgataatcaatgcctacacctgagatcaagtaacatttagaagcactggagggaagcaaacaacatatattgtcaatgaagaaccagacatgaagctggatattttacttgccttatctcattcaatccataagacgaatattatggcctcccattttacatctgaagaaactggaggtcagaaaaaggctaagtccagagctggctttttgttgttattgtcagtttgtaacaaacaccatcctgcttagtatgcaccctaatactgctctaagcaccttaataggaatgcatttaatcattgtaaaaatcctgggattctattgcaggcttaggtgactcaaaagccactctttccacgacaaccctattaaaacaagaaatgtgaataagccatgttgttgctatgcgcttagtgagtcctcagtaaatgttagctgtcttccttctaagatccgagacagaaagaaagaaagccattctcgagtcaccaccctctggaatggaaagtgttcactccactcctgtgtcctgccaccttctctgaggccccttgccgtccttccctctcattcagccattctgtctgtggcccctgcattccctagattgctttggacctttgaattttgtttccaaatctgagttgacaagcactttcaggagaggggtagtcagctgacaggtgggctcaggaaagtgaaaccgaagcctactacacactcatctgcatgtgtttccacacacacatgcacacacatttgcaatgggaagacttacacattggggacacaaaaattgccaaattcatcaatggcgggagctgtttcatgttcatctctgtgccatgagaggcattcagtgaaagtttgatgcatgcatgcatgaatggatgaatgagaattgtgagcccggaaaagaaagtcggaatattagtgtcagaaaggattgagaccattgagcttccatcagtgcagaaatctctacacagtcctactttctgccatacaagtctccttgtttctagaggtagctctgttggaaatccttctttatactgaattaaaatgcacccctctgtaacttccacttatccgtacttccttttccatcttttctttctataagtagttcttgagcgcctcagtgatgatgttgaagcatggtaccatctttatagggctcacagagtagtgcgggagacaccaatacacaacaaacaaaggtttcagatggggtaagggctggggtggggaaactaaagagtgtgagtgaagaggcacctgtttaaaataaggaggtcaggaaggcaccatttctgctgagccctggagggtgaaaaggagccagaagaggagcatttcaggcagaaggaagagcaaagaccccgaggcaggggcaagctcagctcgctctggaaactgagagtggcgcgtgaaaaggactgtgccagagcgcacaggcccttcaggatcacggtgaggggtgtgcacttcctctgactgtccttggaaaccgcagggatgggccattcagtggggaggattatataatctgattttcattttttaaccagcatgctggctgctcattgacaaatgactggtgtggtgagatggggagcagcaaggagcctgatgctgggaaggcaggtggcagtggaagagatggagcgaggggggcagagtcatgacatcactggatggcgaattggatgtgagggtgaggaacaggaatcagagacggctccggggttcctggctttccctgagtggatggaagagtggtgtcatttgctgaaatagagaagaacaggaagaaaccagtttaaagtgagaatgtggggatatattaggttagaaaatgtcacgtaggctgtgaaaatctggaattcagacaggcgatctgggctggagatgtattttaggagtcagcgccatctattccctctgaagatagaaactccaagaatcctgtccagaagccttcaagtcctgggagaagagttggagaacatgcagaatcacaaggaaactgggagagaagagaggaaggagaaggaaaggggtctggaggccaagagccaggaaggctgaaatgaggggtggagaagaaaatatcattccccaggataagagtagggatgagttaagccagctgcggagaagaaagaaacggtcctccaggccttctagaaactgaggacaggcagagggaggccagaatgctgccctgctgtccagagggtgacatgaaaagggccggacagaggccagtgtgtgcaggcccttcaggaccacagtgaggagtgtggacttcctctgactgtccttggaaaccacagggatgggtcattcagtgggggaactgcataatctgatctggggtcttcagtgtgcacctttaccctcacccacgtcctcccatactgagcatcacagaggtccctgactctgcccctccttctcccatactagaaatccttgccctggaggagctcaaaagccaggccttcccagaccttgctggacatgtttgcgacagaaccagggccctttccttttcccagctgtgcagaattgaatttgcagtcctcatgattccataaaaggagtttccaagacagaccttctgcacttctctttggctaagaggttctttgctataaaaaacacaggataatgggggagtgtaccccgcccccagcccaatgctgaagctagggacaggcgttctcatacagctctcttctttccttcacaatctttcctctctcctcgctctgcccaccacccaccacctcacctgtgttccgcccctacaatggtcagggcagcctgaggctcataagtctggccggctcagttttccatctcctggtggccttctgtggggcctcaggacagatcttcagggccagtggctgttctcagcctcgtggggataaccctgaccacagcaagaaatgccctgctcttggagtcacttttgaggaagacgttttcatctctatgtagtctttcgatgtacagggaaatgccttaaaatcttttgcaggagcccaggccttcgtcgttcactgctctgtgttcagccctgctctttgggaaggtattcaagaacagtctaagatgttgcctgaagaaaaaaaagtggcagtctagtgggacaagggtttaggatttgggatgaaaggaaagtggctgtgattgggtcacgttcaaacatcgagactgttggttcctgcctggcattctccctcccatccctcccctgccgtagcctctctgggtccctgcagaagcttcgctgttcctcgtggttctgcttggtcctgagtgcccccacgagcctctccatggttccccattgtccacagaggaagctgctctggccggccccgtcctccagcccttgtctccttttcagagccacccatgctctcaccttttccgtgtaataaataataaacacctctagtgctgcatccttcaagctgcctcccgagatcagcctggctagaagtggtctccaccacctctgagcttccagagcacccttttccctcttttctggtacttaatcagagctcttgatggaaatgtctcatccttccagcaggactggaaagtctttgagcaggactgtctcttggtggcatccacactgacctccttccaaatgctagcccaggaatgccgtgtgcctgtcatctctgtcagtgtcagctgaatgaaggccaacggaagacaagacaggcagcttcctctggggtgcccctcctcgcaaaagtgactccagcccctggctcacaagctccggcatccagcaaggacacccccttcagttctccacccaccacaggagcttgtcactctctggggtggtctgccggaagagaaagcagagatggaaggcaaagacagtggctccggagccgccatccgtgccgtgctcagcaggacttagcagcatggccacccaggtcagggaaattctggctcaagtgtgctcagacagttcagtgcagaactcagggccagtgagaggtgctgggccctgagactacctcaggccaaagttctgaaattcaaccctcccaggctcattggaggatggggtccttgtttgggggtttgttttgtgtcattggttttttgtaacgccgatgaacacttccacagacctagtgttctacagaacacagttctggaaatctgtagggcgtcaccatgattcggggaggtaaaactgacatttagtgtttagcgggtgggactgaggatgctgaaagtcccacaacgtgtgagagggttctgcccagtgaaggagcatccttgggccctgtggaatgtttgggaaatacttatccaaggagcacccttcatgggtgatgttcagtgacactgatagtgggggagtcttcagtggctggccaggggccgaggctcagcaaggataacactgccactagaaatatgaccgtatcttggattgtatgactgcatttcctcactaacctggaatattcacattgaagaacttgaagagcaagcaagaattttatttcaaaaatcgtacggaaacctagacattctcttgggctaggtcttcaatcctttctggacccagtgctcttctttttggaatagtctccgcacccactgtatactccatgtccctacagagctccacagcgccccgtggtggccagtgtcaccccctctctaagaacccacacatagcctcaggctggctgactcagcgtcttagtgacttttagatgaaacctgtttatccaatctattgagaaactgcagtgtctgccaccgtccacagaaatccctaggtagagaaatgcattaaaaggagtagaaaagggaccgggaaagaagggcagcagctgcggatgaaatgcggcaactcttgccccagccttcgccatcggcacagaattcagaggccaaagctgtgtgggccaagctcccgcattcccctgattattatttatttgcagagtgcccacggggcaccgggtgccacgcagtgctccttagacaggcaggccccagctttgccaggaggaccttcccccgctccccccgccccccatggctctgcactcagggatttgcattttgttacaacactgtgacaggtttctttccggccttgtgctggagagcttaaaagtcactatgaagcataaaaaataattatatgacttgcataaagccttcatgtgggaaggctagtattagctattacatttaattatttaatgtagaaaattattcacacggtgtaaaaaagcccggtgggaaagtacactgtggtttccgtctctggccctgccacagggaaggaaactggaacacaccggtctggtaggaagaagagggattcccagacctacagggtgcgtcggcgataacccgacccaccaaagcccgaggtgctgccagtgcttccggccctgcgctgggtcagcctgccttaggggcaggaaggaccttctgtgacacaggctgcgggcagtacaggaaggtagcctctcagcaagaaccccaccaacaacagcaatagtagcaactgtagcaatcagtgagcacgttctcggtgccagacagggcaggtgtgaacttatatcattctcacaaagccctataaggggccaggcacagtggctcacacctgtaatcccagcactttaggaggccgaggccaaagggccgtttgagcccaggagttcaagaccaccctgggcaagaccccatctctaaaaaaaaaaaaaaaaaattctatttttaaattagacagatatagtggcacacacctgtagtcccagctccttgggaggctgagacgagaggatctcttgtgcccaggagatggaggctgcaatgaaatattattgcaacactgcactccagcctggatgacagagttaaaccctgtctctaaaaataaaataaaataaaaaccctacaagggcaagtactctggttattcccatgttgcaggtagggaagctgaggcacagagaagttaggtaacctgcctgcacaacccgaggctcattgtgggaagtgaaggcggtctatcattttattcacatcttgttcaagagtgtgggtgcaggttgccggccagatgccctggccatgcctggagctgggcatggctccctcccccacagccacctctgcccagcgccctgcctggcgtacctgtgctctctccaggagcactcgcccactaggttagagagggcacaaggcaggagtgacaggatgggctgtgggagctttctgagagtgctgagcaggaagggacctctctgtttggggtttggaaagctctctccatggccttggtcctgtggattggactggaaggggttctaggcaggcaggcggttttgaaggctgccacagattcaagccctcccatagcaaaggagagattgctcctccttgttccagccacatctgatgctgcttgtttcctgccttcccttcttcagagtgcatggtgctgttcatttgagcttaaagttgcctgtgtgcatggccatgtgtctgcctagccttatccctctccaaggaggcattgattcagcaccctagtcctggaggcacctttgcagaaaacggctcatttattccagcatgagtagtgtgaagcagctattgggatcccccaatctacccaggtacaaactgaggcagaaaaagagcctcctgagacccccaaatggagcttaacccataaccccaaattttcatctgctctcagtggggaagatggcaggcttcaggagggctgattcatattcgtatgcccaagccttgcatagttacaggcctctagtaagtgcttattatgtgttgatgagataaataaatgaatgagtaaataaatggacgaaggccttcaaaaatgtcctggggaggataagccttaattccaaagaaaaatgggagcagaaagtgtccagttaaaagtgtgcattctaaggagtgtgtgttcctcctgcaactaggagagcagcccccctcgcctccacccgcctggggtcctctcacgaggcaagcacccagccccctgcccactcctgccctttgtccaagcagtcctcaagctagctgtgcagcgtgtgtcttggggtgcttctgaattaacacatcacaggatgggagctgacagaggagggcagaaatccccacctcctcccaggctgctggcagctgtgtgctccagttatgccttctccattaggtgccactaatttccatgattactgttatgtctaaatggcatcctggtgtaatacaatttatattatctctgcttggtgtcggttaccattgttttcatgatattcaatgggatcaactctgcatagacacacagacacgcactgagacttcaccaccaccgccgccagctgccagtgggacccagctcctctccccggttcattcggctctcatcatttctgggacccagaaaagatcagtgtttccaggagctgggcacagctccctcccccacagccacctctgcccagcgccctgcctggcgcacctgtgctctctccagtgcttgctcactcaagcaggacctctgctctcttgcagggacccccttccctaggtccggtgaagccatctgttgcccctccctccctcagcgccaccccaccgtggcagcctccagctgcttcctgactgatgttcctacccctgtctccaagggcccttcagaggacccgttgtccttttccactctctgtctcaatctcagcagccccacttctaatccagccccgaagtcctgcagcccctccagccagcacgctccgtgacccatgtgtcctaggaggggaaaccacgtgttcagagtcagcttccccacagggccggggaactcaggagctggctgcctcccctgtgtttcttggggcagataaggaaggcaggcaggaaggaacagagaagagaaagaaatgagtcatggcagtgacagcacctctgccctccaaatgcctaagactgacagcaccaccccaggcaaggagtgaaaggtgtgcggacttcgtcgtggacgccttcttgccaccagcctgactgaaagctggtgcggcctctgctctgggcagagaaggagcgaaggactcggaattgaagggcaaaggcatgcacccgtcaccccttccacagcagtcccctcgcagctctcctgtaacagacagaaaatgggcccctgccaccacccctctcgataaaagaagagtggcttctaagaacctagcagttaactgtctacatgaactcgagtcttacaaaatgcagccgtgacaacctgcaccctgtcgccaatcccaaacagcgtcagccagatttcattcaggagagtttgaatactagtgacctggaggatgggcagaaaagacctgagagacagactaaaggagaactcaagattccagaaccttcagcttcctccttcctcctttcacacacctaggctttgtttccctgctgttcagtcccacacccaaaatagaacctgtgactcctacgtcactaggcagagcaacgctggtaaataatgacagtggctgaccgggcgcagtggctcacacctgtaatcctaacactttgcagggcggagacaggaggatcacttgagaccaggagttccagaccagcctgggcaacatagcaagacctcatctctacaaaaaaaaattaaacaattagaggggcgtagtacttgggaggctgaggagcttgagaccacagtgagctatgatcacaccactgcactccagctggggcaacagagagagaccctgtctttaaagtgaacattttttttaaaggtagaaattcagagattttggtcatcatcctctgtctggaacattcacacatccagaacacctattcctgaggaggccggatagagtcggtataaagaataggcatctcttggatttttttaaaatacttccctaggtattggtcctcacattaaccctatgcaagacataggactggtgcttgtatggataataatcagattatgattacctcccctcagaaagctcaatctccagccgactagaataaagacaacggtgatgacgagattcttgaaattgcacttgaaggtgtaatgaggtggaagcctctggactctggttgctttttgttttaagcgattgcacacagagggcttgggaagtgttcctccagttggcaggaggcccatgatttcttacataggtagtcatcccatcccttttcccactgggagatgggcatgtcttgtctccaaaaagcagaggacccgggaggtaggcattttacagccaggaagtaccactggaccatggccccacagttaagacacagtatctgggaccagaagaaagcaataaaagatcaggacacatgtgccttgtggatgggagcagaagaaatggcaagttctgagtgctttggatgcatggtctcctttcaccctcacctcaactctgtgctttatcccatgttctaggtgtggaaacagtggtatagggaagttaagttatttgttcaaggctacccagctagtcagtggcagaggtagtgtctgaatccagatctgcctccagagatcaagcttttcaccagtatgctgcctctttcaacttggtatatctccaacgatggagccaaatcagggcatggacaaccaaaatggaagaaaatccacaattctcgtgcatgtgaaatgcatcctatgatgcttttgcagcagttgttccttcccagcaatgattttctgatgtcaataacaatttggtgaccattttctcagcccacccctatcagtgagtggaggtgctctggcactcaggcctaggtactgggacctgccctgagatggccagaggagaggcccatcttatgaacacatctccagagtggggagttggaagggggaaatccactcagcctgtgggattgggggatggcgagggcaaggcttccagctgcaaaaacgctttcccttctgggcagcccgccctgcgtggctctgaggagctggacagtagaggtttggtttgccacttcaaggagagccaggaaaaccctttctccaaccccttacttctcaaccatttgggacacagtcaccagagaaataaggggcaacaggtataaccagactccaggtcagactgatttcgtaagacgtgtatgatttttttcccaccctcccttctccattacacccttaaaacccctattactaatggtttccagcaaccgagggggcgggcaaaaacagagagaagagagatgagacagcatcaagcccttccactcccgagagtgttgggaaaagtattcctcctaggacccaaccacctggggacttggggaccagcaggaaggacctgggccttgtttctgggcagggtgtggtccaagtgggaggaaggggctgttgaaatagtgggaggaggggacaaaggggcaatggggatggaggcctgaaagctggccctgaaattgtcttcatggtccagctggaggactgaggggctctgggcaccaaaggcaggacggtgggaggatgggtcagggtgaagagctgcctcttaaagggaccctgtttgtgcccagacatgtaccctcacccactgcattccagctctgtggaaatcccccagggctggggcacaggagctctcagcgacaaggaacctggttggtttctgcagctcccaggtagtgtgccaccaaacagatgtcagtctaaagcctggagtagcacagcctgctgaggacaagtgtgaggcacaaggccttaactccaacagagcccagccagtgccaatccagtgagagccagcgtggagccatgggaggagggggctcccatggtcaagaaagagggggctgtgccttctgtctgcacatatacaaagaaatctgggagaaagggtgaccaggggtgcacagccaggcggttaacagggttcctttaggtctcagcccttcaccctggtgtgcccgctgattaactgtgtgtgtttctctggttttcaacaccaaacctttgctctgttctgtccatttcttccttttcctttctccatcttagaggtgttgcagaccaaggccaacttacccattttgtttcaggtctctctggtggatgaagattccaactcatcctcctttcttgagcactgacactcacaccttcctctctctcctcctcctcccacaccgaaataatgttttcttgcacgctttctaggctgatgcagagaattcctggattctgctcttgttcttgtttgtctcccttctcttccttgacttccctgcccttcccttctgaaatagctctaccccacaaagacagtattcatatcgagagggtcacccagtgttttccaaaatctaattttaagtcttatgcatagctgtagttcatctggggtcttcacttcttatttccctctccccaaaatcactattctccttttgccctgtgaatgatatctgagaacctgagagcgaattggttatttcctgctcatagcatgtgacttaaatgggagaaagaagtctctctgcctcataggctccactatattcagaaaaataccctgggaagccaacaagaaagccctgatttgaagctgaccctcacctcacccacgccctggtcagctaatctctgcttcacccatcctggctgtccagtctccggggtggcgtttctgttttctttcggcagaaatgcctgggaaccgaaaggcccctttccctgtgacctgacctcccacgctaagaataacagccccaggacagcatgtctttcggtccctctggaaagagggcatggctgggaagtgggaagttaagggagctggatagagctgggaggaaagggaagaacacagattcttggctttgtgagtaaaaaatgaagaggaaaagttggcagccttcaagtgagctggggagagatctggggaacctctcggaggacgcttcatgctttcataccccactccgacctcagaattccacctcctggaagcccagagggcaggcaaatactggtcccactgaaaaaatgtggccagccctgtcttgtccccttcgcagaccatttctaaactaaaggcgtgaatgttttttcttaaagaagacaaatctctgtagtactcggtccttccccctccacccatggggaatatgaccgcctgtagctgggggtgtatggggactatgaccgcctgtagctgggggtgtatggggaatatgatcgcctgtagctgggggtgtatgcacccattcagtcacagaacatcgctgtgcaggcccctacacctcctacacccaagaaatccatctgctaaagagtccactcatccaggacacctggggtcctatagggcctctgggacagcccattccttggttgacctgttgtccaagtacatgaaaaaagtcttttaagaacattcgtcccttctcttctccaaacatggtgaaaaataaacaaaatccatagctacagaatcaagtggtaaagtcaggatactggtcttccccttctgtgccagaatctctccttcagggcaccactgtcttcatccccttctaggcagccagcctcccccaacctaccagcctatccctagcaaacccatcctcaggaaacgctttgatcaccgcgtgccctctgcgcggcgtctgcattcagcaggaccctacctccaaatgaccatgaaagaacctggggaggggcttagaaagcctcagaaagccctgtcaagagccacataacacactcccggagtaggagcccagccttgcctctgtctcctttcccttaggaaagtctttgccagggttggaactgcccctggaaacactggggcacccagtgcaggaactagggtaccctgatttgatctgcaagagttgcacttattatggatcttgttttaacaatttggtccttcttttatttttgagctttatatgagtcaccagtgagcccagataacctgccaccctgcggcccacattgatggctgtggttttcaaagcctttttcattcccagcttcacccataggaccgagcccgctaccctctgaggggtcacacacctgtgttccctccctccagacaggcccttctgctggaagaggactgggggtgcaggagatgctcagcgtggactgagaagagagcatagtagccacatcctgccgcctggcgatttgcaccacccacgccccccacacccactcctgcccctggtgggacgtggacagggcctctgtggagaaggggtagggtgggtggatctgtaggatgggggccacgtgaccgagggaatgcgggcagtagggttagagtgtcgcctccctgctgctccttccttgctggtgctcctgggctcctggccatggtgagggcgtccggaactccagaggcaacacggaggtgcctggacgatgattctgatggtggtgttgctctgttcttgtctgtctaatattcctttttaatccccatcctgcctgccctcccttatgtagggttactttagtgatccctggaatgtttttgacttcctcatcgtaattggcagcataattgacgtcattctcagtgagactaatgtgagtattactctgccctccccaggaaacctcctcattcctcctcctctgcctcgtctatttctctctctctcactctctctgtttaccttcttttatgttttttttaatttcctgtttttacccgcctccagtcatgccttttattgaacctgccgtcgtcctgtgggggaaaaaaagtgggagcttctcctcctttttttccatttacctcagctctgcccggcgctgccgggctggggcgtggagctgagcagagggagtggcggtgcaggggacacaccgcccggctccccggggcggccacagccccacgccacctttgaactaacccagcttttgtcaggcctctgcaccctgcgaaaaccaggttatccaggtttgagctgccagaactgtagagtggtaagagagtgtttaatatgcccacgtaacctctttcttttctcattttttttctcttctctccctttttccatacctttttttttttttttttcatttttcctcttcccttttgttttgttttgtcctttcttgttggttcttcttctctctctccccggctgctctgccccatgcagcactatttctgtgatgcatggaatacatttgacgccttgattgttgtgggtagcattgttgatatagcaatcaccgaggtaaacgtaagtacatggcgtctgtccctaaccgtccgtgcctgctctaacactcatttgccttttcccggtttgtttccttcattttattttctctccccaccttcttattttttttttttaatttgtttgtttgaattggtttgaaggtttttttttccttgttgctttattttgaaatctttttttttttttaactttggaacgcattaggccttccccttttctgttaagttctgattgctgcatcttttctctctcccatacaatcagcctggcatgactcacactgtatcggaggaagcagctctgggagctgtggagtgagaacatgaggggatgtttgccactctgggcagctgctggggcagggacccaaacctcttctgacctccaccttctcctccagccactgccttccctactctctcctttgcatccccacagcatctcagaagggagctctctcaaagtggaacaccctgagataaggctaagactcagcctacaccgtcagccatagcccaccctcgcccaaggaccacccatgatctcgggttgaatgggctctgttttcatttaacatcagcagcccatgcaggcatccaggtccctgcaggctcatttggaagaggaacgagaaggggaggatcagtcatgtctgaactcttctctagaggtggtgggtgacgtactgagagctgctctgggtggacctttcctcctagttgctgtggaagcaggccccatgtgagcgcctcactcccacatgcacctgccacccctgccctcgacccctgacctctcacacccctgcctctggctcccgagcctcagacagcaccccagcctctgcaaggcctcctgccacctccttctcccaagaggtgcctcctcctatacagttcctaccagttcctgcacatgtcttttctgttacctggcatgtttaaatctctctttatctataggcaagccttcttgcggtctttaacatgtgttgtttaattttttcgttattatttttccttaattaagagacttggtaatgtttgcatagacttttgatgcactgaactattgaataacagcacagagcagatgctttagagttttgatctaagatgtttggaactacccagcccaccacccccagctcctccatgcacccttactcccctctccactccatcttttgctctcagtcagttacactgccgtgttatcttgcctgccagattcttccagattagagacccctgtctgctcctcttttagcagatggactatggaaagcggttgtcacacttgtcatatgtcccccgctgtagtctggtgccccaaccctgctcaccctatagctccagagaccatggcccctctgtctccctgtgtctctgagaactgtctttgtccggtgtgtgtgtatgtgtatgtgtgtatatgtgagtgcatgtctgtgtgtgtgtgagcatgtgtgcatgtgtgtatgtgtgtgagtgtatgtgtgtatgtgcactctctcttaacttctcccagtaaatcctcagatcatttttttaaaattagtcttcctactcgtgctctgagactcctctcccctttctgaatggaccccagttttgcagctggatgagccccaagttgctgttcccactcatacacataaaggccagagcttctgtgcccagagcttgtgccatgcagtgctcagccgtgggagacactgcagggagagaaacaggaaagacagggcagcagtgggctctgccctcaggaggtttcctttccagacagcagtgcagagccacattaaaatctatgcagaggggccgagagccccacagcaggaaaacgcagaaaggtgaccgcaagctgcccccctgtacagtggcccactgcagctctgggggtcctatgggttcttcctacagtcaccaaggccccatcgctcagtctgcaattttctcccaaactattcatgtctttaaagaaaaagaaaaaacaacaaaaaagcattttctaggatataaaatttatacagaaaagggggctctgttggggatagggagggggcctgaacccgtccagcagctcctgacattggaatagtggttttctatttacaagtcactttgcatttatctgacaactctaaactaccctttaaatttgacaggtaagaattctcatccccaatttgctgatgctaaaggtgatgatggagagattaagtacctttccagtgcctcagagtcagcctagccctcctggggccagctcacttcctgctaggccagaattcctggtttctgtactccacagtgccttttggtaaagagaaacctcacctgtccctcctggtgtactgccactagccacgacttactcagaacttacattctgtaattgatatcttaaataagcacagggttttttccactttctaaataagcaataatcagccaccctgagagttccgctgcccctgtgtcctcccatactgagatgctccgggctgaggcatttgtggctttgaagtcccactgaaggattgtcgggggacagggtggcaactgtgcatgtgactgacagcaagaggaggtgtcctgagacccaacacctatttcagagccactttctccctctcccacacaactgatggcttccgaaccaaaagaacaaacataacatcccccaaggcaggaaggcggtttgggagaggagaaagctggacttgaagtcagaaaactggcagattgttgagtcttgctgctgcttcctgtcaaagcgttaccaacatgcccagagactctgttttttcatctgtcagaggaatgtggtatttacagcagtgtgttttgaagctcaaataagagcatctatttaaaaactctatataaactggtaaagcactgtggaatgggaggaactgtggcacccaggcaaatgacattccttccaaagttactgctggtgtcactcggagggcctagtctccaaccaagaccttttggttagtctaattataacttacaacccacagtcgaaagccctgtttcccagatatgcttagacccatagagatggccaacaggtacaaccagatcaaagccagcacacacacacttaccacggcccataactctgggccttgaggggcctgctctgaaagcacagtccggcttgaccctgggctcacatcgcagccagtgtgagggacagcagcttaattgagcaaggtcgctccctcccactagattctgcctccagggcattagcagcgtatgggcggccccagcattttcttccaatcccatgggatccttcagaaaatcctgcatccctgggccctgctccgggccttcccaggtatttttagtcatcctctcatcacaagacatatattcccagggatatggtctatttggaaagagtctacattgttagcctcagtgtgatccatgagggcgtttcacctgtaacctgccatctttaactcctaaacccctccccagatgccttatccaccctaactttcctccaaatattccccacatttaaactcgtctcaccttttctcttttccgggctatggggccctccctctcaggaaccatcattcattcaatccacagcatttagagtctcacttcctatacgtcaggcaccgtttgaggcacctgggatccatcagctggcaaaccaaaagcccctgccttcacagatttgcattgtagaagggaataatcagacaattcacaatgcaatgaggacagaaaataaggaactcatacggtgtgttagaagatgatagacgttttaggaaaaaaagtagtgccagataagggggctccaaggtgctggggagcagtgatggcaggcattggtttaaataagatgggcttccttaaggaggtgacagttgaacaaagcaaaggcatgaaggaattgaggattctccatgtggagatcgggagaagaggtagcagggcaggaggagccaacctggctggtgcggactgagctgggaaaggagaggtgagggtagcagaggggtaactaacaggttccacttttgggcttttactctgagcaagaaggggacatactggtggctttgagcagaggtgtcacgtgacccgactggtttttaaagagaccactctggctggctgtaggagtcaagggtggaatctggaagatcatttagaaggcaaatgcagtcatccaggtggaagatgcatagcgtggagcaaagttgtggcagtagaagcggtggaaaatggccagcccgtcactctgttttgcaagcaaaattaacagtgtttcctgacagactgcatgggggcaggaggagaattgcccaggaggactgggaggtttggcctaaatcagaggaggatggagcaggtaggcaaggaggcgggctggaggcggggcctgtgtgagttaggaaatgccagagcacagttttgacgtatctgttagcccttggaggggagatgtcaggtggacacacaggtcagaggcctggggatggagtcattcacaacaagatggtacccaaagccccggcactagagaagaagaagcgacaagaggcagaggagcggagaggcctgggccagggcctctggcgcgaggagatcgggacccgcaaacttctgttcatctgggagatgccgctgaacaactgccaggtgtcacaagaggaccgtcttcaggccccctcgtgcggtcatgctgaattcagcctcagtatctgagccatgggccccggcccttctcctgccaatgcatcacctgggtctaaatccgagcttttcttcctctgtgagccggggaggtaagagtgcgatgtcctgctgctctagggaagcctcttgctcttcctcagtgcttgggtctgaaatcatattttcctgtgattgttcgtgaaagttactacagcaccagaaactgctccctaaacatcccaaactggaattaatttgactgcttgggccaacagcctttcccgacacacttctttttcattttgtattttaaaatatactgaacaatagaaagtgctgggcagcctgaattcctgcattatggacatagagaaacattcccaagttgtcaatgaagaagccttgattatgcttccagctctggtgacttagagcaatgaactccattctctgggcctcaatttccttgaatgcaaaagtgaggagtgagaggtttaggatggtctcttgcaactctagcctgcagtgattctgacttgggcattttctgacagctggaggtggatgcttcattgcccccattgccttgctgggttctgaggtggtgtttcctgtcatcaggcgcccatggtgtcatggggatgcttcctccagggaatcatctgcatagagataatccctgaagccacagtgctgaagggcagcaagggaggacaggctcccttggctttggtggagctcacctggagattctccagagaaaaggagcaggagaaagaccttcggggagcagagcaggcacagggaggggaaagaacactggccctggagcttctgggcacagctctcaggaggaattgctggaggctttgcacgatgcacaggagtgtccagagcagggaaataaagctaagcgaaggtggcactggctgtgaacatgagaagaggaccgacatgaggatgacctgatgagcacggatcaggcatcatgctgaggacaccatacacatgatcggatgaaacccgtgtgcttactctccacatgaggaaatcaaggctcagacaggacgaacatctgcccaaggccacacggtgaatgggaggcaaatcttggattcaaactcatttctgtccaagaattggctcttgcatttcacagtgcccgctggctaaatccctgggccaggctggcctgggcatcactgaagggcagggcccagtggctcctgcactcctcattcagtgcctcctggcaacgggacttggggcggagctgcctgacttgacttctctgtgtcggttgatgctgcggatgctggatccacaaagcctgggatccccctgggatgctcagacagaatgcaggctacacacccggatccgtgtctctggttacagggaacagaaggcaaacgccaggaggcgcagagcagcaccactccctttgcccagttggcatctgcatctgcagctgaagaaagagactgggaggaggggggccagaaggagcaagcagcgacaaggcagggcagagagtgtccagggatcagcatgtcgggatactggtcccaagtcttccccaccttcaggccctgaaagcctttctaccttagtatctttccaccataggcccccaggcacaacttcctataactgtcactcactactctccacaacaatcacaagcaagccgggctcctctctggctctgggtcctggaaggatggaggaaaagcagtcagtcctgagtcatagagagagctacttgctgcacgtccaccccctcaggggtgagtcagctcagcctgcacgactccagccctctctctcggcctgcaacccacagtgcttgcgttggacagtgggcctggctgtctctgtctgcctttgtggctgtaaccacgcctcctgccccctgccatggcagagaaggggccagaatgggcacaagaaaggcaaggctgagtgccccccactgcccatagctgtgatgaggaaggagggtagagagatgtggtcagaaagcagatttgtccaaggacattagggtgtacacaccttagagaccacctagcccaaacccttatttgtttattcctcaaaggtaccttgagcacccgctgtgtgatgttgcttgaggatatacaaattttctagatgaggacacaaaaggccagaggcaggaaacagcttgctcattttcacaggtttttcacagcaagctgaccggaactcccggtcagtagggggctccagtgggtgctgttgccaaccattgtctagatgacattggtgggtgtggcctgagctggttctaggacacatagattaaatcaagttccgtggtctcaggacagctgggtggggcagaggttatccttgacatctccctccagccccccttctcattgctggagcctcctgttgccctcggagtcccttccagcttcttcccactttcggcaacagcccccacccccaacaaacctaatgctaccaagatgccttgtttcaaaatgaagtgattccagcacagtcattcatgctgggtggtagcaactcagtgagctgcccttctaatagatcattgtaccttgaagagaaggcgatgctcaacctgcaggtggaatgtttattgtatctcaggtgagcctttagcaacgtgacccctgagtggggagattacttttgtgaggtccctccccatccccccacaaaggctgttttctactctgcttaagagtatggctggcccttgagagagttagcagagccaccctcattcctagaagtgggatgaagcatctgaccatcagcagtcccctgggaggaggccgaatgccccggatctcaaggtctagggcgaggcttgttgtgtgaactggtgtgatgtggggttgagggggtgcagacagagagacgggcctgagaagtggcctggtgcagcaagtcttctcaaaagcttttgccttgagaagtaccctgcaggtttgacccgaaaggtcatgggaacctgtttttttataggcatccaatttgggttgttaattcagctgtgtgagattgccgaggtcctgatgcggctctgacccatccaggctccccttgccctctgccttctgccccaaactgtgtcactttttgtttccctcaaatgctctttcctttcctgttctcatcttatcaacccacatacggccctctgttcccttcccctccgtgtaagggtgggaggaagttgcctagcacaccttttgttgtggccagacaactgattgtacctggccagtgtctgacacttcagttcctacaggctcagcaacctgctgctggggttctttccagaaagctcgtaaagcaaaggcacctagaagatgccatgagctggtagtgaggagacacaggaaggctcaaagatacgtagggtgcctcgagaagcatggccacttctgttgatgcccacttactctcatatttggtgctcccacccagggaatcatctgtttgtttcctttttgagtctctgccccgccctgcctcacccactctgtttctctgcctttcttctctatcttgtgacctctccctctggcataaggaattctttgatgtagttagtactactggcaccttgatttcattcgtttattcttcatgggctttttgttggtggaggttggttggtttgtttgaatgactagacgctgggctgtccttcccaggggaagatgaaactcccaggcaattctgtgatcagtcttgtttagtgtgtgtttctggcaggtaataacaccttgggagccatcaggctgcacatgataacagtgagaccctgaggcttcagccacttccagccagcaaactggtcactgcagccagtagcacagggcatagctctcagccatccacagcttcacacacaaagcaggaagagcaaaagagggccaggagctgcagccccacgctgggagcccggctgccagtccccttggggccaaagacccctcgaggggagttctgaaggggcatttcaactcagtgtctgtaactccaaacacacaagaaaggcaagaagggccctctccttctagctggaattccactttggagaaacacaaaagcccgtgggtttccgacctgggggtggtggcccgggacagagtcctttccatggtccctgtccatctttagctttatcctggtgcgttccctgccctttgtttgtcttcttctgctcagttcttctcctccatcacttctgtctctccactcacaccaaaccaaaatgggaattctgcttagaattgctttcaactacgcatacctcattcatttgctcttctgtctgaaagccatggcctctaccctcagcttctgtctatcccagctaacgtttgtttaaccttcgcctctcttagcaagtacctgttcattcagctttagaaggcttgcagcttaaaacatgtttgcctttggcctccttaaaatgtcttgccccgctgccatacccagtggctccaagattcagcacctcccgactcctcctgagatgtgcatttctcctggtgggaaggggagataaaaggatcgtgaggatccccccacacacacccttaacctacacctgctggctcctggccatgaagttggcgtcagatgtctccagcagcccctgacccctgccattcccagctctctctctgcaccagcctgaccacctcctcccaacctagatcacctccgaggtctctccctcaaagccccaccccttggtcttcctccacaccatgacaccccccaacagaaccagctgttgtgtcttgcaggtcaaattgagattggaggtagtacaagcggagaagcggagcatggggagggggtactggctggatggagaccttcaggtggcttggaatgaaatttatatcagatccacctccctaagttctggacaagacattttaaaaaatatagcaagggttctgtagcaggaccactatttagagactcacactcccatgacattacttttgacatctgtttcagaggtgcgtggaatcttagtgacactgaggtcatagcattgtctcaatggcagccattggaattgggcagccgttttctgtagggctaagaccagccttccctggaggagatcagaggtaatctgcacctttcaaaatcagcctgccaaggagaatgcagccatggcttatgcccccttcacaatgctctctggccacctgaccgcaggagagtattgtggaggacaactgggttgggtattccagcctagagatctactgctcagcccctgaatttctataattcttacccttggctgtgctttaaaaaaataataatttttaaaaaactttttttcgtatggtgaagagctatttttcaactaccttttaagtctccagagagaccatgtaatgtggcaaccaggaaacacatcctgcggcctcccacaccatcctggtgggaaaatcctccacctgggaggatcctgtctctgctggcctctggcattccctgagtatcgcccctcagcatcctaaatgtggcctagacctggcactccaatgaaaataagtgcatagtgagtgccttccagaaacaaagacttcatccactgaggtgttacttctcatttgaccctgaacttaattcagaaagacagctttccagagacctccctctcattagctgccctgcaccactcccctcctcactgccagttctgccaaaacaaggcaatctgcataagcatattgaaggaaggaaatcgtctttcctttctgtttgccctgagcctgttatctggaaccactaaccagagctcgctgtctctgaaaatgcccgacctctgcctcagatacggaataataacctcatttcatttatatcaattacgtgaacaaattaagttaattgccccaatatcatgaaatcattgaaaattaccagatcattagaaaacaaggatgaaagaattggctgctcagaaatttctccacgcctaccattagtggagacagtgccatatgaaaaatcagccagaatgttcaggttatgtaagcagctctgttggctgccctaaaaggggaatgcagtctccaggcttgggggtgtatgtcttcagggaatcctacggcccctttcttccccaagaaagaccacagatgggagaaactacaaactaactcagggcaccggcagcaaatctgggaaggggtcagagattaatggcccaagtattgatggctaccaacaaattctgaatttacatccaaaggtagaactgatgctttgtagtttctcaaggggctgtacttggtatttaaagagagtggcaaaccacagaaactaaaagtgctgatcctgggataccacagatgtccaactccagcaagtccaatctctccttccatctcagcaggggattcatttgccaaggcgaaagggtaccaaagactctaaggatgacgtgggatcatgtaggaaacgcccagggcatcagtagacctcgggggccttgggggcaggggctgtggcttaggctgcttcctattgttaccatgtagaaatcactcagggattgctctctgatttcatcgcgagtggttattcatttatgagaccacggaccttgtaaacagctcctcatgtggaaacaggtgtgagcggtggtagaggcaacagtgtcctagctactcaaaaatgccctgtgaacagcatggcttaaggctcaagaaaaacttaatctttgagtctctagattcttccaaagttggtctctttggagagttgtcattaccggggcaggagaatgccacacagacatctcagagcgtcctcattcttcctctttctactgtcctcatagctgctcctgactttctcttgtctgccattatagagacatgccataggaaatgttaaatcaatacatgttactaaaatacaaaatactatcaagattatctgaacagatccaaagtcaagtcttgaagtgaaatatgacttaaataaatgaggtcttaaatgggagctataaaatgcaacaagaaaaaagacagttaagacaaatgtttaaaaatcccaaatgaaggattctgaatgtttaagaagtaaaacaggttttttttggttttgttttgttttgtttttgtttttttgatgcctagaggttggttcaattaggccaggcaagccaagtacctgggtgcgttgtcagaattatctccattttggtcctgttcaggctgggattgacccagaagaccttcaagcatttgcccagggttcttagaagtgatgagcagctgtgatggttttcaggatggatccaagaggccagcaatggctcaagcttcctgggagctctgcccaacactcaggagttaacatggtgtaggttacctccctctggacctccctccctgccccactgaagcctgagaaacacagaactccttgtccatgagcaagggagctcaagcactgggccaggagcggggcagaaaggtgccagtggatagctagacctgaccatcctgggcaactatcacacaccagagcaaaaggggtttaggtgctttgccaagaaatttcttctgtgcatgcctgtatgagagagagagagagaaagagagagagagagagagagagtgtgtgtgtgcgcgtgtgtgtgtctgcctatgtttgtctctgtgttcaatctcagtctgctagccaaatcctagggaccccacaccctgcaatcacaaggactgacctggcaggtggaatcttcatgaagcagaagctgagatctagagatccagatttagagtgttctgtaaagcctagagaagtgtccctttctttctcctccctcacctcaccctatatctccaccatcccctaaaagggcatcctaccaactagctatgaaaaaaaaaagaatttgctgagaaatctgttacccaagaaatattttcaggctgcaagcaaatgtctagttgtgcacatttccatccttcaaaaattccataacacattttccttgtttgtaccttaaaaacagaaatacaagagcaaccatctgaaagtggagagtaaaagccaagtcctgactttctagaaagagttagcagctcagatggtcaagatcagtcggggctgagccctctgtgctggagcccaaaacgtaagggcaccttcccagatccaggctccaggaactcggggagagggctggccctgggatactcaccagaggccagtttcctcagctcctacccccaaatgagttcagcagtcagacccgtgagaacagcttcctggggtgttagtgtcctaaattgtgtgcagggctttcaagtttagaaaacaattcaacagtcattatttcatgccaacggtcagggctcgccgcacctatagaccaacagctaagcaaggccatctcctgcctgagcctgagctttcagaacaagccccattatggagtgggttgaggccacctctggaggccctcctcagtgttgacttgaagtcggtctcccctaaacctgagaggccactgcccttgctttgtttaaatatatgtgggcaaggataggctctggggtcagcaaggcctctgtccttcagctggccctgcctggggtaagctaaagtgcacaaagcctaagtcctcataggttaacaatggctaataaaaaacaaattaaaacaggcttggcacagtggcttacaccggtaatcccagtactttgggaggccaaggcaggaggatcgcttgaggccagcccacgagtttgagaccagcctgggcagtatagtgagaccctgtctctaaaaaaattaaaataaaaaatttaaattagccgggcatggtggcacgttcctatagtcctaactactagggaggctgatgtgggaggatcatttgagcccaggagttcaaggctgcagtgagctgtgattatgccactgcactccagcctgggcaacagagctgagaccctgtctctaaaaccaaaccaaacaaaaaaattataaacctccatccacaaaatcccaaagacctcatctgcttatctaataatattatgaatgtgagttatttaaagggcataggtaggagaatgcctgtgggtccttgattgacatgagacccagcaacacagaccccacactcatggggacgccccaggacctgccaggcctacgctttcacgtttctttcacttgtttccttttgccctcttctgccactgtgttgctcccgtgtcagccaagacctagaataccgggcatcttcatgggagactcattacagcttatctctatctgcctttctttaaagccagctgaacatacccaatgctctccctctatggtaagaccaaccctcccgaccatgctcccggcttccgtgtccccctctaacacccccactctccccaccccgaactccagagtccctgggagccctgcctggctctcactgcatgtggccactgtgtctgccgtgtgccttgcctgcctgttcccttctcgtgtgagctgtgaagatgctgtttgtgcagtggtggtgttttacccctgagctttccttggggtggtaattcactgtgatcttgactatctaacaagccactgggagagaatgggacccgaggtccatttcctgttaaacaccctgaggactccaccggccaaagcctctaaccttaatctgataggagaaatttgcagagggtacctatgagagccatggtagggctccagggtaaggagggaagacaggtgctctaggcaggagatggaagggtggacgatgattcctgttaatcagtgtctgtggctcctagcttccctgtgcttcaagtgaaaggccaccataaaaggtttcagctgggatttgttactgagcgcgtgattgaatttccagtcactccaaccttgctatcccttgcatttttctaaattcctgaagtccgttaaaattaggctgcagccactgttccgcagcaagctggaagcagaaaaacaagctccgttgattggaccactcctgttgtaggagtctctgattcgcgttggttgaagtgataaaagagacgccattcagtgtgaccttgaagcctccttggcccagccgcctccaaaaggctgccgttatgcatttctaaccgggccaagtatgagtttttagaaggaccagtggggttgattgaccaagccaccaagtctgcaggccgaggcaagcttgggtgggttgatgtgttccccagtgcagcctggcgctgcctggccacaaggctgccacaggaaaggctgagcccgggtgctctaccccgcttcctggggactctgcttctgggatcagccatctggatctgcctcctttttgcattgttatttggtttattagagcaaattggtgcatccgaatggcagtgagtttattctccttctcgagcagcattaggaaactgcagccacaggggagggctctgaacagtggaatggaattcacgctgcaagcttggtgtttggcgttttttgggtttttttgtttgtttattttgtttttttaactgagcagatccagatgcccctgtggcaccaacttctcaaactcttgacacttgcagctaaagttctccacttaagcttgttcttttttttctcctttctcgaacacggtggaactgacagctgagttataaaatcctaagcctcctctgcatactcctctggggaaacacaacctccttttaaggagtgaaaatagaagttcaagcagatacacaggtgatagaaatacagagattaaggtcatcaaaggcttcagaacacacaggcagggaagagcccagggcaggacagggctgctgcctgcagctcttgacccagcccctcaggtacccgtgcagcaggtcccgagtcccacctgtctgtcccctgccttgaggggaacgggagccttaggaggaactgaggcagctctaattttgaaatataagaaatatttttgctcttctcctgtttggaagatctggaaagcaggagaggtctctggcttgcttctgggcagagtggtggctgccttcgggtctccctgcttccctcataatctcctgtcctgcatagtgaggggagcggcctctgacgcctcatcagggtgggccagagcaggcagcgcagttagaagggctttagcgctggatattgccagtgagagtctgacctagaaataattaaagataaaaggcaaggtaaagcaaggagtggggagggcccaggtggccctagtaacaacctgagccctcccacctcgcgggaggtgtggacgggaccagtaacaggaagccccgagggtccattctctcccggtgcccgcaggtctgggtgagctgcactagctccggatttggcagtggcttcctcctgggttcctgctcaccaggccgatgtgggcaggaggagggccaagtggggagtcagctcatgttctcaggtttggaggcagaggaccgcagggcagcccgtcctgccccctgagccctggccaggcatgtgcccaagcccccaggctcccccaggtccaacagcagcagcccaagcacctccagtcaccttggcctgcactccacccttcctccccttcaccttccctctccccttccccagggcccctgagggagaccatctgcagaagcctcacttgcaagggaggcctcccctcccttacgctgcccctctcccttccagggtcttgtacagcctgaagggttggagcctcctagaggccccagggcagaggggagtaggagggcaacagcttcggagcaagggctgcaaaccagaccctctccagcactgagtagcacccgtaatccctccctttgggacaggggctgtggaaagtagaaggaggtgatacaaggaaagtgctggagtcccaagcagctggggcatgaggtccttcagggggcagcccaccaggacccccaaatccacgcatacctacagctgggagagaggccagccaccaacccacatcctcggagagtgctgggctccacttaggacacaggactgtctgcccagacaaacgggagacaggctaggactgcttcctcagcagtgcagaggaggggttcccagggcagctggctctgggcctagaagattccaaagcctatggtagttcctgatggagtcgtctgtcctccatccagggcattaagaactaggaatgaaggggaatcggggagaataaaaacacaggaccacagcccagcggcctgggcacagtctagctctgcagagaccatggggctgggctgtccactcattaaagtgggcggccgccctcccatcggagggggaagtctagtgcagcaaaccctggcctgccttccgccactgccactgaggtctgtatttctcggaggggccctcctgttctcacccccctcttgctgtgctaactgcacctcctgttgccgacgggttccagaacgcagaggaaaactcccgcatctccatcaccttcttccgcctgttccgggtcatgcgtctggtgaagctgctgagccgtggggagggcatccggacgctgctgtggaccttcatcaagtccttccaggtagccgcccctcatgtcctgcggcccggggaatcgcagggctgccgcgtggcccagaacacagctgacacaaggaggagccctccactctggggccctgctccttcctctgtgtggcagaactcggccgctctgcctggctccctgtttccgcaccgagaggcctagacgaagcatgtggtttccaaggcaggctcagagccccagaaggccaggtggtaaaggagggatgggagctaaggggaggcagaaagggtctgccttacttttaaccatcgtttatgtctttctgcacaagaatttactggacaaaggggttttgtggtaaggaacaaacctgaaaaacacgggcctggacaacctggtgaccgctatggcccttcgagttcagcatttccagaatctggccatcgccctcctccccgtaggcgtttcagcagcatctgctgacagcacctgtcatgtcctcggccagagtcgcaggaccctggtgtcctccgctcggctagagaggcccttcgaatgggcccaggactgcctggccatgtgatcagttcctccgctcagccattgttttcccattaaaacagagtgacaatcagcccctgccagctcggaggagtctttgtaggtttgaagttaaggagaagcaaagcgcttgggtcacttgacttcccccagatgagcgcagaacccgtgaaggcggtttcatgcttccctgggctggcggaacgcaggcttctctccccccatggaggggccgctctcagcctttccaagacgagaatctgtcagggaagatggtctttgtgtgccccaccctggccagtccctgcccggggacagggcatgcctgggcctggtccaggtgaggaaagatgcccgtccccgctctgcccccagcagcctcctgccagggactgaccatccaaggctctcgagggagctcccaatggccaggctgacccctgcctagtgatgagctggggctcctgcactctgagcccagctcagcccaggctctggggattcggaatagtagacaccagcggaagcaggactgccgctgactctgtacttgggtgcacgcggaacccacggctgtgagttgccatactctccctgcccccccgacatctcctggggctgggaagaggcacagaccgggtgactgcgagggcctgatggcggcgcaggcgttcgggccaggcagctggcgcctgctctgacggcaccctctagtgaccggtggccacggctgaagcggcgcccgggaacacgggctgggcctcccatcctggggaccatggcctgtccccagaagtcacgggggctctggaaaattagttgtctgagttgccaggcagataatgcatggagcgaatagagcgtatggaacccagctctgcaaggcattgcactaagcactttataagccttaaatcttttcaaccacaaaaccgctgagaggtattattattgtttccatttttctgatgaggagactgaagttcagagaagttaagtgccccaaccctcacagatagaaagtggcagaaacaggatttgaacccatgatctttcttttaaatttttccttattaaatgtttccattgcaatagtaatacccgctcactacaactagtgggatggaattaagctgtgtaaagaaagggtgtaacttgccaccaccccactcctccacaggtaaccacagtcagcggggtgctgtcctccacgatttctcctgcctcgtacagacacaccgcacatgtgtagtcggaggaggttttgctcgttcttgattgttttgcccaggtagtgtcgcactatatcgttactctgcggcctgctttgaaaaccaagctgaaatgggaagtcagttccggtttctcagaccttctcgcaggttccccgtagtcctgtgggactcttggaagtgtcccccggcccaaaccgggcaatagctgatggctgcagagacagggatgcggcgctccctgggaaggggcccagctggcctctgcactccagcctcatgggagtctcctgcacttccttccaggccctgccctatgtggccctcctgatcgtgatgctgttcttcatctacgcggtgatcgggatgcaggtagggaggctcccaccacggggctcctggcctcccgctctgtctctccccagttcccagcaccacattccctaacgccttcctccctcccttctccctttcattcctgactgtccctctccctcctcttccattttctgaggcccaaaaagccacaggaattggaactttccccaaatggatctcctgtaggtagcaggagaatgtcccggtacagaatacacagcccagagagcctccctccccgaggcctgggttctgctcttggtagaggaaagacactctccagttatgcaaggggcctcgggacagacacagccccttctcaagaaacagcagcaaggtgtgtctgtttgtgtccagcacccctgtttgtgtccaggtctgatgggcctgagagttaccccaaccagattcatttgaagctaatggctgagagggagggagggaagaaggaagcaaggaagggccaaatcaacacaaggttcaccgcatcaaatgtgcagcagttttctggggcctcccctcccaggtgcccactgcaccattcaccgcaaacctagggctctccattcccgtcttggggctccagcttgagtcccaaggccaaacttggcagggcgcccacactagcccaaagcgcttcctcggccgctccttcaggaagtcccctacttgctcatcgcagaaagacccaagattcagttgccaaaaccttttgagactaaaagagctaccttgatacctgataaaggtggcagtttctaagataagcacagctttaaaagaccaggaagaaaagggatttcaggaatgcattaagcttgccctagcctcagatcactcactccacatcactccaaaatgcaagaactaaatttgaaagagtgcttggacatgcagaactgaaatagcaaagaaaataacgcagtgcgtcctgtgtcctgtcagaagcaggatcccggtcccagcatccaccgctctcagccccagctcccactgggctgcagggaccttcctgaggctgtgggcactttgattctcatgcttgtccagtgtagggatttgggctcaggggctgggtggggcagcaggtgcctgccaggttgcatgggaagactgttcagcttgtggcagccagttccagggacacctgagacccctgaagagaccattgaacaatggtgggaaattaggaccctatctgtccacaaatcactgaacacctcttccttctctctcctaggtgtttgggaaaattgccctgaatgataccacagagatcaaccggaacaacaactttcagaccttcccccaggccgtgctgctcctcttcaggtgggtccctgaagacataggtgcacagatacacacacacctgcatggtgccacactgtggcctggtggtagaatgaaagggaactgcttcccggggagtaggaagggagaggatgtgttgcttgctctctgcctgacaaggaggccagtgggtccattgtcatttatgataactttccacagagcaacccactatgcactggcacacctgctggaaaccagacaaaaccattaggggagcaaaagtcacatgctaaaagcagcctggcttggaatctgaacaggcccaaagccaacctgccgacacgctttgtgaccttgagtgagatatctaacttctctgaacctcagttttcttgtccaataagtacagatatctatcactataccagcacctgtgccatttgccgtgctgggcgcttatgtccacatgcactgggcgtcatcctcacttaatcctcaacacaatactagcaaactgaatccaatagtacatgagaaagatgatacatcatgatcaagtgggtttcattccaggggtggttcaacatatgcacatcaataaatgtaagacaccatattaacagaatgaaggaaaaaagacccacatgatcatctcaatagatgcagaaaaagcatttgacaaaattcaacatcctttcatgataaaaactctcaacaaattaggcatagaaggatggtactgcaacacaataaaggccacgtatgacaaggccacagctaacatcatacttagtggtgaaaagttgaaagcttttcctttaagatgaggaacaagacaaagatgcccactctcaccacttctattcaacataataatactggaagtcctagccagagcaattaagcaagttttaaaaagttatccaaataggaaaggaagaagtgaaattttctctgtttgctgataacatgatcttatatatagaaaatcctaaagaccaccaaaatctattacaactgataaactaattcagtaaagttgcaggacacaaaatcaacccacaaaaatgagtagcatttatttacactaacaatgaactatctgaaagagaaattaagaaatcagtcccttttacaatagcatcaaaaaactaaaataaaatacttaggaataaatttaatgatctaaactgagaactcataaaacattgataaaagaaatagttggtgacacaaataaatggaaagatatcttgtgttcatggattggaataattaatattgttaaaatgaccatactacccaaagcaatctacaaattcaatgcaattgctatcaaaatgccaatgtcattttttatggaaatggaaaaaacaatcctaaaattcatatggaaccacaaaagaccctgaatagccaaagcaatcttgagcaagaagaacaaagctggaggcaccacaatgcatgatataaaaatctgttacaaagctacagtaaccaaaacagcatggtactggcataaaaacggacacatagagcaatggctcaggagagaaacctgagaaataaacccactcatttacagccagttgattttcgacaaaggtgccaagaacacacagtggagaaagaacagccttgttaataaatagtgttgccaaagaggaaaaagggaattactttcaaaatcatcattagcattagacttctcattaacaaaagtatatatgtaatagaagacaatggaataatatgttcaaaattatgaggaaaaatgtatttttgaatctggccctctaaatacagtctaatcagcattccagtagtcaagcaaaatagagacatttccaagtgtttaaggacccataaagtttactccccaacataagtcttccctggagcaattactcaggctgtacttccacagaatgaaaaatgaatcaaagaaatagaatgagcagagtaatgatatgagtaaaaaataatgaagtttatagttatgagttatgaacaaggacattataaagtttatataaagtctagatacttgttaaggggaaaatgtacaaaaccttaatgacaatttggaagtaatattttatgttatctctacaaggtaggaagtgaggtggtagaagaatgagaaacatgaaaccatgctaagattcttctcttgtttggggataagagtatatactgtttaattctgtacataactaagggaaaagtgtgtatacatatatatgttaaagatttaaaggtcaatcactaaaaaaatagaaatggaatgtatatattctaaaccactagaggaaaaaaatggatggataaaacttagcaatccatcaaaaggaagctaaagtaaaagtagaaaaataaataaaacatggaaattagaataataaaatgagatggcaggaataagaacaaagataataattgctaaacttattgaggtaaagttcactattaaaacatagatactctgatgttggctttaagaaatctagctctagcctgtttataacagctacagtaaaacaaaatggcctaaagaaaatgcaaataaaaggatggaaaaacgaataccatgtaaggctcacaatgtagacgtaataatagcagtagcagaagaaatagaattccaggtgaaaggcattaaacaagacaaagagggattttatattgataaaaggtataatccatcaaaaatatataatagtcataaaactacatgagcctaacaatatagtttggaaatgtatcaattacataccaatagaagtataaggagaacacacacacacacacacagtggaagatttaatacaggtagagcatgacagaccaaatagaccaaaatagaaaaaagggtaaagaatatctaaataatacaattaacagacttgaacttatcgagttatactcagtaaatggccaaaaaaaacacattctttttaaacacctcagaaacattcacaaaaattagccaagatttaagtcacaaagaatttaacaaattctacaactgcccctactttgatatagccaaattagaaattagccataaaaacaaaaacccctccaaaatctacttaaaaatttggcactcttcttagtaactcaaagctgaaactacaatctacagtcatgcaccacatgatgacatttcagccaatgacagactgcctaaaattaaaatggagctgaaaacttcctatcacccagtgacgctatagcatcaaaatgcagtgcagtgccttactcaggtgttcgtggtgctgccagtcatagataagtatggcccatacaattatgtacagtacataatatttgataatgagaataaatgactgtgtcaccggtttatgtctttactgcactatacttttatcattattttgcagtgtactgcttctacttatttttttttaagttaaccgtaaaacagccttaggcaggtcctgcaggaggtattccagaagaaggcattgttatcataggagatgacagctccatgcatgttagtgcccctgaagaccttccgataggacaagatgtggaggtggaagacagtgatgttgatgatcctgaccttgagtaggcctaggctaatgtgtgggtttgtgtctcagcttttaacaaaaagctaaaattaaaaaaaaaaagttcaatattaaaaaaacataaaataaggatatgaagaaaaatattctgcacagctgtacaatgtgtattttaagttgcgttattacaaaagagtccaaaagttaaaaaaaatttaaaagtttataaagtaaaaatgttacattaagctgaagttaatttattactgaagaaagaaaagtactttttataaatttgtgtagcctaagtttatagtgtttctagtctccagtggtgtacggtagcgtgcagtcatgtcctaggccctcacagtcactcaccactcactcactgccccacccagaacaactttcagtcctgcaagctccactcatggtatgtgccctctacaggtgcaccgtatttaaatattttttactgttccttttttactgttcctatttttactgttccttttcagtgtttagatatgtttagatacacaaatacttaccattgtgttccagtttcctgcaatattcagtacagtcacatgctgtataagcttgtagcctaggagcagtaggctgtaccacagagctgaggtgtgtaatagctacggcatctaggtttgtgtgagtccactctatgctgtttgcacaacagaattgcctaaccatgcatctccccactgttaagtgacacaggactgtacttagaaatgagggccagggcaccagatcttaaacgtatgagatgcatcaatcagcaccaaagaaaaaattcagagcctgaaatttatttatttatctaaaaagctgtatattaaataagctaatagatggggaaaagaatagtaaaataatcccagaatatgaaggaatgcatttttaaaaataaaagcataaattaataaaatatggattttatcaataaaccctaaagctgatcctttgaaaagaccaataaacagacaaaccatcaaatccaatttttttaaaaaaaaacacaacaacatcagaaatgcaaaaagcaacataattacagatgtggaagtgatttttagaatgataagagaatttcatgcctctgttttgtggcacttcagaggtgatcatctacttcaagatgaagcagaaagtctccttcccagccagtggctgccagaaactcattgaagtggacagtgaatgcaaaccataccttttatgagaagcatatggcctcagaagtcgctggtgccactctgggtgaagaatggaaggcttatgtgggtggaatcaatggtacaaatgacaagcgaggtttccctatgaagcagtgtgtcctgacctgtggttgtgtccacctgctactgcatacggggcattctgttatagaccaaggagaactgcagaaggaaagcacagattgttcagagttgcattgtgggtgccagtctgacttcttaatttggtttttgtacaaaaagatgggggggagagaaagatatttctagactgactgatactactgtgccttttcacctggggtccaaaagagatggcacggtccgataacttttcattctccataaagatgatgtccatcagtgagtaaacccctaaacaaaggatgtcaggaacccaggaccaaagcacccaagactcggcatcttcttactccacatgtcctgcaacacaaatgctgacgtattgctctgaagaaacagaacactaaaaaaaaaaataagtaaggcccggtgcggtggctcacacctgtaatcctagcactttggaaagccgaggcaggtggatcatgaggtcaggagttcgagaccagcctggccaagatggtgaaaccccatctctactaaaaatacaaaaattagccaggcacggtggcgggcacctgtaatcccagctactcgggaggctgaggcaggagaattgcttgaacccgggaggtggaggttgcagtgagccgagattgttccactacactctagcctgggcgacagagcaagactctgtctccaaataaataaatataaggaagaggttaaacaatatgctaaacttttggccaagagaatgaaggagaccaaagaaaaatgccaggaacagatttccaagacatggaggctatgctcactgagagcttctgagtctatcaaaaataagattttcaccaggcatggcagctcacacctgtaatctcaacaacttgggaggctgaggtgggaggatcagttaagaccaggagtatgagaccagcctgagcaacacagcaaaaccccatctctaaaaataaaaaataaaaatattagccaggtgtggtgccatgtgcctgtagtcccagctacttgagaagctgtagcgggaggatcacttgggcccaggagtttgaggttacagtgagctaagatggctccactgcactccagcctgggtgatgaagtgacatcccatctctaaacacatacacacacatacacacacacacacacacacacacacacacacacaagatttttctaagagtagcagacaaataatatcagacttttaaaaagaagacagagaacatcatgaacaaatatgcaaatatatttgaaaacctaaatgaagcagacgcttttatgtagaaaataagaattataaaattatcttaagaattaaaaaaaaacaactacaacagaaattgaaaaggtagttgaaaatttagcctttgaaaaggcccaaggttcaatatttttatttgtgaggtctaccagactatcaaggagtggatcattccaatgttatataaactttccaggaacagaaagatgtagaaaacctcttcacccactccataagactaatataaagctaatgccaatgagaaaaagagaaaaaagcaagcagttataaatatgaaaatatgtacacataattgtcattgtttgcagacaacaggctaattcaagtagaaaatccatgcaaattaactaaaaaccctttaggacaatagaattaataaagtggaagattaaaagattaacaaagaaaaataattgctttcctgtactggtaataactaattagtaaatgtaatagacaagatcttatgctatcactttttcaatgttattattttgtaactcttacccaataaaataagacaggaaaggccgggcgcagtggctcacgcctgtaatcccagcacttcgggaggccaaggcgggtggatcacgaggtcaggagatcgagaccatcctggctaacaccgtgaaaccccgtctctactaaaaatacaaaaaattagccgggcgtggtagcaggcgcctgtagtcccagctactcaggaggctaaggtgggagaatctcttgaacccaggagatggaggttgcagtgagccaagattgcgccactgcactgcagtctgggggacagagaaagaccccatctcaaaaaaaaaaaacaagacaggaaaaataaatcaaaggataagaattggagaggaagaaacaaaattaaatgccaaaaaagttgattgcctgtgtatatatacaagaaaaattacagaaaattgctaaaactgataggatagtttagcaaatattctgtaatatgaaatcaattgtattccctctatatcagcagcaaatggacatagcttttaaaatataatgttgaaactataccattttaaatgtacaacaaaataaaaggagagagatgccacgtttctggccaggagacttaatatcataaagatgtcaggattctgcaaatgaattgacatctcagtgcaattctaataagactcccaacaggattattcacagaggctgaaactgattctacagtgtctatggaatagaaaaggaaactgaatagccaagacaaatgttgaagaacaacaggttggcaggactcctgcactgtgagagggcaggacttactataaggcaacttactatgcagacaacacagtacttctgtaccaagataaacaaataaacctgaggaatgcaatgacaaggctagaacaagacccacacatctacgcaaatacaacttacggcagaagaaatatttcaattaagtaggtgaagatgtactattcaataaatagtattaacaaaatgacttatctatgcagaaaaaataaaagcatatttctacctcatatcaaacatgaaaataaatttcaggtcaataagttattgcggaaaaacaaaactttagaacctttagaagaacacagaaaagaatgtctttatgacctaaaatagagaaagattttttaaacgtgatgcaaaaagcacagaacatagaggaaaaaactataaatttgacctcattgaaataaaaaacttagattcaccaaaatacaccgtaaataataccagagacaacccacaaattggaagaagatatttctgttgcatataactaacaaagggttaagaatagacacgaaaccaccatgagactccaccttcctcctgcaagaatggctgcaatttaaaaaataaaaaataatagatgttggcatggatgtggtggaaagggaacacttttaccccgctggtgggaatgtgaactagtacagccactatggaaaacagtatgaagattccttaaagaactaaaagtagacctaccattccatccagcagtcccactcctgggtatccacccagaggaaaagaagtcattatgtgaaagagacacctgcacacacacatttatagcagcaccatttgcaaaatgatgtaatggactttggggactcggagaagggcaggaggatggtagggatcaaagacgactgcttgggtgatgggtgcagcgaaatgtcagagatcaccactgaagggcttgtccgtgtaagcaaaaaccacctgttcccaaaaaactattggaaattttaaaaaagaatagagaatagagtatcttttttttttttttttttttttttgagacggagtctcgctctgtcgcccaggctggagtacagtggtgtgatctcggctcactgcaaactccgcctcccgggttcacgccattctcctgcctcagcttcccaagtagctgggactacaggcgcccaccaccgcgcccggctaatttttgtatttttagtagagacgaggcttcaccatgttagccaggatggtctccatctcctgacctcgtgatccgcccacctcggcctcccaaagtgctgggattacaggcgtgagccaccgcgcccggccagagaatagagtatcttaagcaccctacaaacgaacaagaagacaacctgaatcaaacaagcaaaaacatgaacatgcaatttaatggaagataaaatttaagttctcaacccactaatcattttataaccaaattaaaacagcagtgacatattatctcacacaaattatatgagcaacatttaaaacaattcactaatgaactgatgagtttgtacagtagtgttatttctcctacactggtaataggagtctaagttggacaaatccttggaggtcatggaatatctagtaaaaataaagatgcatgtagtttaactggcaattccacttctaagtggatacccaagatataaatctgcatgtttattgcagtgttatttgtactagtaaaagaaaaaatgaaaaacctaaatgttccttaacaggacagtggatttttttacggtaagttcatagagcatactcctgtacagcagttaaggtgaatgaactggaactaaaatacatccaaagggctaagtctcaaaaacatcacatggattgcaaaaacagcaagttttcggaaaaggtgcaatttgttactgtttatataaaattttaataatgctatgtgtttcatatttagcaaatatatcagagcattcagggaatgatgaacatcaagttcattttagtaactccctctggggaaggaggaaagggacaggtggggagggatgcagagggccctccttggcatctgtaggatgggctgcatgaacgtggctctccctcccctccaggtgtgccaccggggaggcctggcaggacatcatgctggcctgcatgccaggcaagaagtgtgccccagagtccgagcccagcaacagcacggagggtgaaacaccctgtggtagcagctttgctgtcttctacttcatcagcttctacatgctctgtgccttcctggtaagccaagggggaactcaacagccagcagccatgactgcccagttccagggcagtctgaaccgtccatctctgcagctcatggtcagggcaaccctatcagaggagctggcttgggaagactaagttggcaggagtgtccagccacatggagagaaaggcagaaagccctgggccagagtgagctccaccagcatcttgcttgtctgttcttggctgttgtcatggtggcattgtcccagaggacaacggggacatgtgggggcctagaaagaactgtacttttttggcatcttgctgaggagtgaggaaaaggggataaagtccccctctgtcctgcacagccctgcccagcagctcggtaggagggaagctgtccagcccacctgtgggttcatcacacacaactctcagggaaactgtgtcaagtttatgtccaagagacccaggttctcaggctggtaggatggatgactggtctttagaaatgttggcttctgccatcagtaggccccagctggcaagggggttccagaggcaggtgtgtaggaaggtcttctcacagcacctcattgtactgttccccacagatcatcaacctctttgtagctgtcatcatggacaactttgactacctgacaagggactggtccatccttggtccccaccacctggatgagtttaaaagaatctgggcagagtatgaccctgaagccaagtaagttcccagagggaaatcctgattccccaagctgagagagggtatagctgaccatacctgcaggaggggctcaaggttggccaacactgggtggatcaattagaaacactggattgtatcacaccctagggtgaaaggtcaagggccagcaggaggaggcccggcaccttcaattaagtcaagaatgtatctactaggttgggtggggtggctcacacctgtaatcccagcattttagaaggcaaaggtggttgaatcactcgaggccaggagttcaagaccagcctggccaacacagtgaaccccatctctactaaaaatacaaaaattagccggacatggtggcacatgcctataatcccagctactcaggaggccaaggcatgagaattgcctgaacctgggaggtggaggttgcagcgagctgagatcacaccactgcactccagcctgggcgacagagcaagactccatctaaaaaagaaaaagaaaataatatatctactatattcagttgaatggaaggataggaaattctagtatcaggaataactagtaagtgctcaagttaggataggtagggccggggaaaatcttgattccattcccgcttctggtctaaagatcaatcacattcggctgaccctcagtaaataccttttggtcagaaggttagttcattcaatcagcaagtatatattgagaattttgttgcactgctaaaatcccttccaccttgaacatagcatgggcagaaaatgattcattaaaatctaaacacgtgtatatgtatattggtttggggctgtgtcatgcaattctgcaactctgtactgagtgtgactaatagggctaccacactgtgcagtgttgcccatatgagtgggccctacccctcaggcgcatgcgtcctgggctgctggcagagaccgtggctctctgatgccctgtccctcctctccctcctcttctaggggtcgtatcaaacacctggatgtggtgaccctcctccggcggattcagccgccactaggttttgggaagctgtgccctcaccgcgtggcttgcaaagtaagagataacggggttcatgggagggagagggaaaataggggaagtgaagtgcccatttcttgtgatcctttaagggaatgaacatactagtttatgtgcctaaagattacattttaagggtccttccagctctaaattctcagactctatgagggaataacagagtgaatgcctcctgtcctactgagccagggacccagtcctggataaaggacttgttcagtccatcccactgcaccatccgggcatcctggggtgggagacttcccagcctaggctagaggggttcggcgttcttttcctggagttggaaggccattagaaagcccaggcattgacttcaggggtctttgagtcctaaaatttttcataaaatcactaaaatacaaagtttaccagggagaggatttctcactttaatcagattccttagtgagaccatgacccaaaaaaaaagtgtcgtttccttttctccctcccctccaccatggccactccacgctccttttctccctcctctccaccgtggccattccgtgctccttgttggggcaataatgagctgacagagagctgggggaagggagaccagagggctggagagaggaggaaactcagatggcaggaggattcggctctgtgagaatccactcatggaaaacgcagattgagggaacatagaaccttctacttgtgctctgtttactgagtttcttctcatttgtgcctccactttgctccaaaaacaaacaaacaacaacaacaacaaaaacagattttaagagatttccaagggcatagaaaatatcagaaaagagcataaaataaatgcaaggtacaaacaccatgcaaggcaagggtggggaggggtgcagcctggagggggctaaagtgcgtccgttgtggcctccggacgggcctgggcaggctgaagcctgggtgcgaaactttccggtggccaagatacagttcacaccgtccatgaggctcatcaagatctggtcactcaggagaagtgtaacccttctagacactgagattagcaggaggtcaccgtgtgagctgacaaatagccccccttgagcatgcccttggcatggacgctgtggtgagcttcacaccgcgcttgctcgtcatgacccattgcatgctgaaggccccacaccagagctccgtgccagggaagcctgttctgggggtgtgtgctgggaaagaagagggcaagacagcactatccagtgtcagcaagcttctgctccaacttgatgcagaagcatatttgtcaatacacagagaggacatgtagcatctcctgcaggcaaagctcctgtgatcctttctcttctctgggctgtggacgaatgctgcctggcaggtgggctcccagcacatgctggcgtacagccggtctttgctgccagtggagagcacacctgcacgcctgagcagactttcgagcagggcgcaaagttgggtggccttcacatccttttgtggaagtgaaggtctaatgaggacaaatttcatacctctcccactccacgaggagggtcaaaagtagttgtggcaaaggcaagattctccctggaatgcttcagggagcattcactccctgcccactccagcaacacccacacaagctgcgtgtcacccccagcatcctctgtgtattaggccatccttgcactgctgtaaagaaatacctgagactgggtaatttataagaaaacaggtttaattggcccacagttcagcaggctgtacaggaagcatggcactagcattctgcttctggggaggcctcaggaagcttccaatcaatcatggtggaaggcaaaggggaggcaggtacgtcacatggacagacagggagcaagagagaagggggagggaccacacacttacttaaacaagcagatctcatgagtactcactcaccaaggggatggtaccaaaccatttatgagaaatccaccccatgatgcaatcaccttccatcaggccccacctccaattctggggattacaattcaacatgagatttgggcgaggacacagagccaaaccatatcactctgccacggtgttctgcggtcccctaagcaccgcctgccatcatcaccagctttgcttctcttcgcctgcagcgcctggtctccatgaacatgcctctgaacagcgacgggacagtcatgttcaatgccaccctgtttgccctggtcaggacggccctgaggatcaaaacagaaggtaaggtcgcccgtgggcactgggagagacactcagaaggtctagcagacaatcagagaggagctcggcagcctgcaaagtgctcaagggaacttcctgccccagacagcatccgagctgggatacgggggtaacgtgcgctccaggacatcgcagggccccagcctgctcatgacttctttgctcctgaatggtctccctgcctctagctcaggggtttccaatcttttggcttctctgggccacattggaagaattgtcttgggccacacataaaatacactaacgatagctgatgaactgaaaaaaaaaattgcaaaatactcaatgttttaagaaagtttacgaatatgtgttgggccacattcaaagccgtcctgggccgcatgtggcccatgggctgcaggttagacaagcctgctctagcttattcattttgaactctagctttccatgaaactctgggactcattctgggtggtatcttgaagtcagagggtatagctcacaaaacagaaggagacgggtgttacctgaagcaggaccaacccctgtctaaaagaacttacactggctacaggtgggtgtctcaaatgctcaactcattaaattaataggactgtgctgggaagacgtgtgggaaaggggacacagtgacaagtggtggccgtggtggaggtcatcgcacacattgtgcgggctgagcctggcttaaggctcttagccagcggacaggtgaggattcagacctcacctgtgccacctagtcagaccgggctccctcagggctgcgtccacctggaggggcccttctagttttcacaaggcaccctaagggctagcagcagcctgagtgagataatctgcttgctttatgatggataagagtttgcgaaccactatgggaaaggctgtattaaacacacctaacaagataccatttctctccaagagtgtccagccttggagtgtctagtgtttcttagagcgtggtcaaaagaccaccgctgcagaatcagctttgggtacctgtttaagctactgagtcccaggcacccacacagacctgctgatgccaaatccctgagcatggggcccaggaatctgcatcttgaaccaactacagagatgattcaaacccactggtgtagtaattacagaaaacacagatgagacaagcagtatgcttccttccccttcctacacttccagcttaaagctcaggctgtccgtcagtgtgttcctcggggcaacagaaggagccccgggcaggtgggaggctcgaatccgagtccctgctctctcactaatgacatgagtatgagccatttactctctctctacttcagttgctccattggtagactagagaaaggtgatgacatctgggaatttaattcattgaataacccagacatgggccttctctccgttagatccttcaaaaacaataacagaaacatttcaaatgaagtgaaacaagaaccagtccaccaagacacaagtcaaaataattagctgatttttaaaaaataaaaataggggccaggcgtgctggctcgtgcctgtaattccagcactttgagaggcccagtcgggcagatcccgaggtcaggagattgagaccatcctggccaacatggtgaaacctcgtctctactaaaaatacaaaaattagccgggcgtggtggcacgtgcctgtaatcccagctactcaggaggctgaggcaggagaatcgcttgaacctgggaggcagaggttgcagtgagccgagatcaccccactctagcctgggcgacagagtgaggctccatctgaaaaaataaaataaaataataaaaataggacaagttctgctactaaattaaaaaaaaaaaaaagagcaaaggcttaaaaaatataccatcagtagccaatgcaatcactcaatctgaaatgggtgtaaataggcctatttctgactgccagaaaaccaaaacacactttttttttttttttaaatggaatctcgctctgtcgccaggctggagtgcagtggcacaatctcggcctgctgcaacctctgactccctagttcaagccattctcctgcctcagcctctcaagtagctgggattacaggcacgtgccaccacgcccggctaatttttgtatttttagtagagacagggtttcaccatgttggccaggatggtctcaatctcctgaccttgtgatctgcccgactgggcctcccaaagtgctgggatgacaggcatgagccaccgcgcccggccaaaacacacatttaattcacacatatgtgtgtataacaaggaagaaaactgggaaggaaatgtgttcgtatgctaacactgattatcatgagtagaaagatcagcagtgacatccaccttactcctttagtttttttactttccaaatgttctgcaaggaatgttactcccctatgttcagagggaaggagaggcgatataaatgactgccaggaggaatatgctgtaatacttaaagattgatgtaaattaaggatgtgagattttgttccctagaggaacaaaaggcagggaggtatggaagcaagaattcagcagggtcgaaggttcactgtcaaagccaaccacatgccaactaaggaagaccaatagctagtaacaatgcgaaagactgaccagtcaaatgcagggacccaattctgaggaaataagagttccagagaaaagaggagaagccagccatgtgggaactacaatcctgtcaagaattacagactatcttttaaacacaaagacatttcagaacagctaccaaagggcccgaaacgcccccacccaagggtgagccttcatcagacatgggccctccataaacttgttaaaatcgaaacgcccccacccaagggtgagccttcatcagacacgggccctccacaaacttgttaaaatcctaagaaagaaagacaaagtcaagtcttggaagcaactagaaagaaatgtgagaagacatctacatttgtgaagatgaggcttgcatcagtcctcacccttcagacttctcagcgtggaaggaattggggcgaaattaacacctacctcagagaagcagagctgtcatcccaagtccagtaccaagccaaagaagcttctctcttggaacgtagaaggaagagctctcatcccaagtccagtaccaagccaaacaagcttctctcttggaacataaaaggaagatagtgaaaaatacttagatgacatgaaacaattgtcggtgaacttcaacaattacatagaccatcatgagaataaattaaggctgataaaaaaaaatgaaaggtccttttggaaactatgttaatttcttaggtctgctgtaacaaatgatcacaaactgggcagctggaaacaagagaaagttctctcagtttaggagaccagagacctaaaactaaggtgtcagcagagttggttctttctggaggctctggggagagtctgttccaccctttctcccagattctgagggctgtggatgatgcctggtgtgcactggctcacagcacatcacgccatctgtgcctccatcttcaaatagcctccagggtcttgtgtcctctcctcttcttggaaggacaccagccacattggacttagggcccaccctcatccaggatgacctcaccttaactaattacattggtgaaaatcctatttccaactaaggccacattctgaggttctaggcagacatgaattttgggaggacactattcagcccagtaccgaagctaagtatatttgaataccatgtgtgttaggatcttgcactgcgtgtgtcagaaacctccagctacctctcccgtgatggggactgatcatctgtgcagctggaaggcccaggagtcgtcccctgccttcaggtcctgtttggatctggcatttggggagctcgggattccgtcaatccctctactgccacctctgcatgctctgccctgtggccccagaggtggatttgaacccaggcagtctgacacaagagccctcaaccacaatactggactgccggtcctatgcgagagcagtaaacatcccgtgttggtttcctactgctgcaaagcaaattactacaagcttttcagcttaaaaagacaccccgttggctgggcacggtggctcacacatgtaatcccagcactttgggaggctgaggcaggtagattacctgaggttgggagttcgagaccaacatggagaaaccccatctctactaaaaatataaaattagctgggcatggtggcccatgcctgtaatcccagctacttgggaggctgaggcaggagaatcacttgaacccaggaggtggaggttgcagtgagccaagatcgcgccattgcactccagcctgggcaacaagagcaaacttccgtctaaaaaaaaaaaaaaaaaaagacaccccgttagtagctcatggttttgcaggtcagaagtccagcagtggtgaagctgggctttcataaggcaaatccaggatattgatcaggccatggtctcttctggaggctctgggggagatcatgttgttggtggaattcatttgttgcaattgtaggcctgagatcctcactttcctgctggctgacagctggggaccccctctgctcctagaggctgcctctctcagttcagcccacatgactgtttgctttcttccaggccggctggagagaactctgcctttaaagggctcatgtgactaggtcaggcctgcctaacctccctgtcttaggtcataggtgccgtgtgccatataacctaatctcaggagtaaaatctatgatggtcaggggcccagggctttggcagcatgtgtaccctgatgaggagcatcttagaatcctgtcccctacatctgcccttacagctgtaaggctcagctttcctttttcatcactgtaaggctaggaccccagaggctgcataaggcaggcatctaagtaggggaactcgggacagagccctcatcgacagatgtaccctccaatcatccatgttccctgtgactgccgaaggaggtccatgagaaatgccacccatggggaccagccccccactgcccgtggcagggccatacgtgttccagctggtgagcgcatggccgccattgttcctgcccaggggctgggctcagtctacaaggaagagcactgagtgccggtggaggggccccctggctggcctgagccacaggcagggggaaggggacaggaatggcattggacggggcacaagagggaagggggaaggaaggaaggtggacagaggaaggggaagaggaaggaggtggaaaatgggaagactggggagaagtgaagcaagcaagaaagaaactgatgagtcagggttgcgtggggcagatgccaccatctgtggcttcctaccttacgcagagggacccagcccatcagaggcccaccaaggggctgaggatcctttccgccctgcagggaacctagaacaagccaatgaggagctgcgggcgatcatcaagaagatctggaagcggaccagcatgaagctgctggaccaggtggtgccccctgcaggtggtgagtgctccctggactcccgcaccttggccactgcctggccgtgcccccctctgcctgcctctcctccagctgtggcacccttagaatgcggaagcatcccctgagacttgcttcttgagtcccctaggcttgctggaggtctgccttcagacccttcctgtggggctcagaggccctgttggttagaagggaggcaggtgcaacgccctgcacaaactcagaaacagaaagtcaggttggaaatctggtacaaccctgctttttacatagggtaacaggcaagtccctgatgcttaggggtttggcagaacttctaaagaaactccacaaagtataggtttcccataaacctgattgctgtaggattgctctaaggccctcaaacgagaatcccctgagattcctcccctcttggatgacattctttttgttcttccaagagcagtgtttcttgaccctatcaagcctcaaatccctttttatagcaaagagtttatattgcctttactatgatcctgaatgaaaattataggtaatataactttcctatacatataatttccaaaatattaatataatgccttcactctaacataaaatctattaaaagcagatgtttccaatatgtaaatactcaggcataactataccagcaggtacatttaattgatgagatcttctcatgcacccacttacaacacatacggctgggttcacaggaaacaagacaatactgaatactgtcaacactttgatttgccattttgaaataaggggtaaatcagtatattaaataagtgtgtgtataaatagccccccacacataaacacacacacatacttacacatatgcagaacaaccgtgatgtgacacttacggtgagtgacccacacaccctaaagagcattgccatcaggaatacagttttccaaaatgcgaacctctcttggccaagtttaaataatccaaagtatagttttcctcaatttacacagcagttgtattcctggaaattgtcaggtgtgttaaaaccatgcaaaacaatgtcctgtgttcatttgcaaaatgaaattatgttccgagcccagagactcctaagcagaatcatggatgtgtggcataagcttgagagccatgcagagtgcaaagctgtgattgcagaacatgcctgcactttaagggacaggtctggagctacttaatgctagtggcacccccacagtaccccgacaactaaaaaccaccccacacatttactgtgccctccttaagaggcgacaccacttgtgttgagaaccatttgccagagggaaagccggatttgggctaagcgaaaatctcgccagtgccatgtgatgtttacatacatcgttttattgaatcctgacaacatttctgtgaagtttgctcagggaactaaagttcttagaagctaagttgctggcccaaggttacctggagagtccacagcagattcaggattcaaacccaggccccagggaacctaggactccaggtaggactccaggcttgtcccaccatgcagttcttccttcctgactatgctggacaggggaccctgggtttttccctcccacgtggaaagggggtgcttgccagagaagggaggggtcatcactgctatggatgtggctattttggagggacaggtaggaggaggagaaccctcaccagcccctagatttaatccccagctgtctcttgggcccgtggcatctcttcacaaagaaccaggaggtagatccaaggggctcctccccaggcatgaaatgtttcctctaagaacttatggcttctccaccatcaggtttactcccaggaaagggactgatgatgtcacatataatcttgggtatccagcccagcagggatgcagccaagccacctggcacaaaaactcaatcgggtttgaaagaaaaatccaaacttccatgggaagaaagccctccttccaccagcccctccctccgagctaagctgaaccgttttgcacttgcacttggaagagtggccagttgatgagggacatttgaagctctggaatcaaatgtatcagttcagttaaaaaaaaaaaagcgggaaataattttgatggtaggctaccttttgcataaaaaaaacaggagataatatgtttgatgatttacataactaatttgcactaagaatctctgagaaaatactcaagaaactagatgatctacaggaggtggtgactaggcagataagggctgtggtgggagagacttttgaccataagcctttttatggttttttttctctctttttaagccatgtgaatgtattacctctccaaaaatattaaagttttaaaaagttttggatgctgaaaaaaaaaatgaatgaagttcaactgaattcccctgctcccctcttaccccctctcccctctccatacgtctcagatgatgaggtcaccgttggcaagttctacgccacgttcctgatccaggagtacttccggaagttcaagaagcgcaaagagcagggccttgtgggcaagccctcccagaggaacgcgctgtctctgcaggtgagggcctgggggcgggcccacactccaggaaggtcctggtcattgcctctgacctccagtcagggtcccggtccctccccagcaggctggaggccaggtccctgcagagggaacctttcagagagctccagacctttccaaagatggctgtgagaagggggtgatgtgcccttccctacctgccacccaccgactgccctccatggttctgcctgctgtcatagcccccagatctctcaaatacttcactgaggctcccgtgacagcccctgacccctggtgccccgtcctaatgagccttcatccctcctggatgggcgagtggattgttccatcagagggcagcccagcccccagttcacacacacacaaaccttccggagggtcgactggctgggtggaggatgccagggccctggagggacaggtcttggcccgaggctgtggctggctggggagcttggaggaaagggagcgtggtcctcaccatcctccccttggattccaggctggcttgcgcacactgcatgacatcgggcctgagatccgacgggccatctctggagatctcaccgctgaggaggagctggacaaggccatgaaggaggctgtgtccgctgcttctgaagatgacatcttcagggtgggtggtgccatggcgcactctcgacccctataaagttcagtttggagcaagaggttgggctggggttttgcggggaacgtccaggggaaggagctgcaccagaggaaagggctacttccaggctcttcctgatgagctgtctcctcacccctttgccttttccaagcctgactccatcccaaggcagggctccctggaaacagcagctctcagtgtcactggctctcagagaagcgggaaggaaccgccttcctaagggaaatgtttcctaggagaaacttctgcattagaagttgcagagtggtcacccctggggcacatctaatctgcaggcttgttttgtttgttaatatttgaaaatcaagacttctggcattctttggaaaagtcaggagacctggtaatattaagcttgcattcccacagggcagcagagggccggagcctagaggcggtggccctttgagatggagcatagcgtgtgttctccaggtctccaagacccctccagaactcccctttccctctcctttcctggagactgaagctgcccagcagttgcaatagtgaaaattaaaacggctgtaccagaataaggggcgtttatcactcatttgtgttgcctgcctcaccacgctggtgtttggttacaaatccttctatagcaagggagaagctgccagccataattgtgcaggaccctgctcacaccgctctctcccggccgcgggcccagttcccaggctgtggaacacacagggggcaagctgagcccatcctgcccctgctccgtctcttcctcatccttattcttgtcactgggagacattcgtcactgagtggcctcagggacatggcatggtggtgacacaacccgacaagacaccagaaaccaaagcctcagtcaccaaggcccagggatgctctgatgtcaagggttggaacaaccgtgcaaatagctacttgcccacttccccaggacaaggaaaagaatactggggaaaaacattggctcctggttttaaatctctctgagtccccgaggggaaaaagaccatcatgcaggaaattcttcattttcaaaaccgtttggccaaccagcttttagctctgtgagcacactgggtttccattttttaaatctggttagaatcttctggtcgctctcccagcccccgccctcacggtgtgctggctgctcttagggaccaccatcctagacgtgccctggaaactcactcccagccttcaggggcttcactggaaacctccagggcagctcgtaccagcggcagccccttgcccaatcccatccccactggtgggtgggttctcccagctgctgcagaggggagtccagagccttgagactccgggtccctccctctctggagcagccaggcatgaagaaggtcctcaggtgctcctggctcccagcagggctgtgcctacccgaaagaaggcagcccgccttcccaggccctgcacttccctgacctggctgtggaggctgctctctgggaggagtgggtgctaaggggcttctccacccacccctccttcttgcctacagagggccggtggcctgttcggcaaccacgtcagctactaccaaagcgacggccggagcgccttcccccagaccttcaccactcagcgcccgctgcacatcaacaaggcgggcagcagccagggcgacactgagtcgccatcccacgagaagctggtggactccaccttcaccccgagcagctactcgtccaccggctccaacgccaacatcaacaacgccaacaacaccgccctgggtcgcctccctcgccccgccggctaccccagcacggtcagcactgtggagggccacgggccccccttgtcccctgccatccgggtgcaggaggtggcgtggaagctcagctccaacaggtaagtgggaggctggccaccccaggcggcacacagggcccacgtgctgcaaccctcaggagacagtggaggagacggaggcctcggccagccacttgtccctcaagcttccaggaggttgctgccccagactccagcaagagcaggaggcactatgctgtctcccaagtcctgcccttgatcagacctggcaggctcagggcaagtcagcagtggcctgcggcgctggttctcccacagggccctctcctctcccacacttcctgagtggcagaatgtgatcatcagatgtttgtgttccggcttcacaacagaaaccatcccgtctgcccttccccgagtctctgcccaaacctggcctttctcccagccgagatgggaatggtgtttccattgcttccctggagcccctttgccagcctcccggagagggcatcccctgtgggaggcgccatctgtagcactggcccattctgcccagcacaggatcattcctggaggtcttgactgtacctcttactcctgactcactcttttctccttgtcctctcatccctgtgctctaggatgcactgctgtgacatgctggatggtgggaccttccctcccgccctgggcccccgcagggctcctccctgtctgcatcagcagctccagggttccctggcggggctgagagaggacacaccctgcatcgtgcctggccacgcttcactgtgctgctcttccagagtaggagagtggctcccagcaggctgcacagccccccagcatgccaggttcttgacatgctcgccctccagctcagaaaataatagagaagtagcagcttccctctaaacccctggaaaagtgtccatccaaggagcaggcacacctgccgctggcctgcctgtccctgcagagggcccatttcaagagggctgcatgcaagcccatgggactcaggcatttaattgtgtcagacgacaggccagttaaaaggaccatctccctgtctgctttcctttctgcaaggttggctggtttagccacccagaagcagcactgggggcatccttcaattcatgaggcctgcactgctgccttctgtgtgcacagggcagtgtgctgggcactggattttatgtgccggcctgaagggctggctttgcataggagaggatctaatctaggcatctagtcttgggggcctgcacctgttgtgggggcctcatccttctctgcaacctcactccccttccacggcctttgaggacccaagtactgggtccccatacccccttctcccctctggcctcatgaagcttctgcttaaggagggctccacgtccgtctttagcatctcagggtgaactaattccccaccctctaagggcattttcatgtgaagctttgttctctgtgacataaggggagagggatgtttagaggagctgggggaggagaccccaggggatttccttgtccccacagatatatctctccacatagcaaaatacatgcaaagcacccggcacagtgcccagcacacagtcggtgctcatgaaatgtcggttccctctgcccactgcagatggtacaaacaacacacagggcatcaagcttcagcttggtgaagaggaggagcatagcccacgtcccagctcccttgtccccgtgtcacagctcaaggctaacggcagctctagtgccagcattgcttgtgctgaggatgggccagcacgtcctgtgcccggtggcccccaaaagtgctgctgcctgcctgctgctgctctgcgtctccagctcctccctccgtgcttcaccaaagcccactccacctccctcccctcccagtcctcctggagctcccacctctcatctttccttccactgcggggcgggtggcagtctgcagtcctcctcctcgagagagagaattgcttctaccctgcctgggatgctcagagccagggcactgatttagcactcggctctgagaggatggaccaggatctttctctgatgccctcaggggtctgaggataaagtgggcccagcatgcaaggtctatagaaagcaagacaaagggaggcactgagctgagctcagacaggaaaaggaagaggccttggtccagagctaaagatgacctgaccctgtcccagcagggaaaggcacgttccgatgtgtgaggatctggagctcaggagggattcaggctcagcagggactcaggctcactgccttctgctcaggagagcaaacccctctaggtgaggcttcctctctgtgcctttaccccagggtgccagtgtcagaatcaagggcaccatcaaaataagaggccaaggacttctcagctatgccaaatgccaaagacccaggtgtcatagctggaggtgagtggggggcagcctctaagttaggcagggcatatgtcattccaatttcatagggaaactgaggcatgaggtggaccaagtgacttggaccagagggtaagtggattggggtcaggactcctggatccacagcagacatccttctcccaaatgggaccctcaccctaatctgaacacttctatggatccatcagcaatcacaggagaacaaagcaccagcaactgtatgcctgttcacgtgtgtgtgcttgtgtttgtgcacgtgtgtacacctgcatgtgtgtgcgtgtgtgatgctttacttgctgaaggaagtggaggaaggttggcagtttctgatgtttttcttcatcttggatattgtaggtgccactcccgggagagccaggcagccatggcgggtcaggaggagacgtctcaggatgagacctatgaagtgaagatgaaccatgacacggaggcctgcagtgagcccagcctgctctccacagagatgtgagctctgctgccctctgctgaggctgacccaagtgtgggaacaaatgtggggaggcagaggcaggtccctgagatccctcctctggggctgattgcaggaggagaggagatcacagagaaaacatctgcaccgcctctttcatctcctcagtgaaatgggagccccccaacacacaacacacacaaacacacacacaccacacacacacacagacacacacaacacacacatacacgatgccctttttagcttggggtttcctcgccaggaaaatttctgaacattgttttataaacattgtaggctgtaagacacagtcataaatatattttctggtgagactcagtatgcacatacatatatagataattaaacaagtgtttcaagacactgcttataatgaagctgcccagaagagggcactggtggcaaagccaggcctgagatttttgtccttgctgccattcttagagtatttttagctgcagttctagatcctttagaaggtggtgacatccatttggtcactaatgactagcccttaaaagcaggtgcagcacagcacaatatcagaaactatcagaatgcgtcaaacgtcacaaaggtaagcgctgtgctgggaaacacttgcttaattgccaacagatgtggctatctgggggtctccttgagaaacatctttatgactctgagtcacatccacagaagtttgagacacagagtgacatccacagaagtttgagacacagtgtttccgaagcttttctggctcttttcaccctcaaagccctgtctcatctgttactgtatacatgactcacaacaggcctctgagacagagagggcatatgtcatttcaattttgtagaaagggaaattgaggcatggggttttccccagggggtaatgcctgggtcccatgggcttgcgtgcagccacttgaaaatgggccctctggagggacaggcaggccagcggcaggtgtgcctgctccttggatggacacttttccaggggtttagagagaagctcccacttctctattattttctgagctggagggcaggcatgtcaagaacctgggatgctggggggctgtgccacctgctgggagccactgtcccactctggaacggcagcacagtgaagcgtggccaggcacgatgcagggtgtgtcctctctcagccccgccagggaaccctggagctgccgatgcagacagggaggagccccacgggggcccagggcgggagggaagccctcaccgacccctcccagcatgtcagtccattcagttcctgaaaggacttcagagtgaggaaggactagccttgcaggcttttgaagacaggaaaggtgtggctggaggtggtgggaggggacaccaggtgccccaccctgaggagtgtggggagaatggcagccaggccagcacagcatgcggcttcctggggtccagtgctttctgctcgggaactggatgggaagagtagcagaagcacctccttttccccagcatagaaagaagaatcgagtgagtaaggaaaagcatggaaagagtcccaaccagcggcacttgacaaatcactcaactgccctgtgccttcgtgtccccatcagcaaaatgggacggtgggggtgacaggccttctacttttctgactcagtgaaacacggtcaatataaaaaagggaaatacctgaagctccttatgagataactgtctctaaattgattcttagagaatacaaacgaatgcctgaccacctaccctagaaatcaggaagagcatatattttaaactatttcggttattctagagtgcttggtgcaccaggcactctgctaggttgttaagaacccagtctccatcctcaaggaaattccacaaactaggaaactaagagggtctcaggagaggaagataacacagagtttctcactacccccagagtggtacaacccccaggggtacaggcgttcagagaaagttgagggcagggtgacctgaactggtaccacgcacaaggtgaaatggaagctggatctgcaagagccagggtgatttgcataagaagaaaatacaatagggaggccttagctagctgagagtaagagctagtcttgaaggtataaatactgcggtctgcactctaccagccttcctgcacatctataaatcatccaagtctctgtgctgtaccatgagcaggcatggagtcaccctcagaggtgtggggtggcaccagggaccagtgagtcagtggtctcatctgggaatgaggttggaatgcagctgtgcttcttgaactgcaggctgacccagcagagattgtgaatcaaaattttaataaaaatagaacagactaaagtggactgggactcaccagggtgcaacgcatgcaccgagggtaaccaaaggctatgaggtttcattccatcaggtgtgtctgtgcatgatgagaagctgtcaaatctacttctcatcgagtttccatcaaaggcctggaagccatagactagatgccccatgaggtccctcacagccctgctgttcacctactgagtgaccgtagagtggttgtaggcagctgcttatgtgctcttgctgatgagggggtggcagggcgggagaaatcgggggacgggcataagtttgggtgaaagttgagggtcactggggaaaacagcatcagctcatgcaaacacgggagccaaggccattccccaaaagaacttcatgggcctaggattctttccgctttctcaacacctttgaccccagagtgccttcactgccccaagtcagaactgcaggcttatgagacaggctgcgggtgaggagctggccattcccactgagcaggcctggaagacgtcaggggcaggccagaacttcttggggtggcaattccccaaacctgcatgtaagcacaaagtgtgcgtcccttcactaaggatcagagcaaagtgctttccgggggtgcagctgtccctgtgggtggccacttctcagcctccaggaacaagccccatgagctctctgttccaggctctcctaccaggatgacgaaaatcggcaactgacgctcccagaggaggacaagagggacatccggcaatctccgaagaggggtttcctccgctctgcctcactaggtaaatgcaccgctcgctctctggatgtggtcggcggttactccctagagaacactggtcagggatgattgggaaatcgttgtggcctgcctcaaatcagccccacacagtggggcatttccaaagcaaggagacaacattccaaaggcagggtgtgcagggatgagccctggacaccagaatacgtctcagacgaggggaggggaaaggaggagcgtctcgggccatagttactgctcctggcaccccaccagggtgtaaactgtcacaggccagtgccctgttttcctgccctgatggtggctctctggctggctttgcaggtcgaagggcctccttccacctggaatgtctgaagcgacagaaggaccgagggggagacatctctcagaagacagtcctgcccttgcatctggttcatcatcaggtagctcacacttttggacaggccactgtcacctgccagcaggccagacagtccccagggtgacggacaaatcctgaagacttcagtgggtcttgcctgtctcagatggctggcacgtcctgcccctgccctaagagccatccctgtagggcttcacactcctgtgcaggtgagggccacggcaaggtctgcagcatcgcaggtgggggcctaggaagtgctggtgcacaggagctctttgtgtgatcctgaggacccacagctgcaggttccacctgagctttcttcttaggctgccacagatgccactgacgcctctgacactggcctatgcctcagggcactcaggaagatgtacttgtacctagagtttgaatatacctggaaattttgccacacaaaaatccatccagtgacataaagaagtgattaaagaacccaccagcaacatggtcaagagtagggaatgacatccgtgggaagcaggtccagggagattccataaatgaaatgtctcttggcatggctgactccagctgagacagtgaaatccaagatgccaggaccaaacatgccttagtatctttgaacttcagtgttatctaaggccagtctattaaccccaggcaaactgaggtctaaacctgggtttcccaacattctgaccttattaaagttatactcttttatagcatggacctatgttttaaatagacctatgctttgtacccaaaggcattcaactgccaatcaaaagtcataatcagcatgagatggccagtgtggcctggctgagttgatagtacttcagctccaaaaaataaacaggttttcttagcctgtgtggtgttgtcttccactgggctttctgaaataatgaatatggccttacacttttctcagattcccagggacccaggagccccaggctgaggaccaccatgggcaggggcaggaggtggaaggatgtggggacactgtgtgtgctatcttaaaagatttctagaagtcgatttcacctatctgttcttgtcgtactggtaggcacgaaactctcctcttcatctctttctcctcctgtactctgtgaccctagaggtggtctttccccaccacagtgtcgctctctcccgggagcacatcccatcagagcagctcaccctgcagagcctctgccctggcaggttgtcatggcaacagccagacaggcctggtccctaccctcaggatgctcaagaatattcagggacagagggcgtaccgtgtgacttttttttttttttttttgagacagagttttgctcttgttgcccaggctggagtgcaatggcacgatctcggctcaccacaacctccacctcccgggttcaagtgattctcctgcctcagcctcccaagtagctgggattacaggcatgcaccaccatgcctggctaattttgcatttgtagtagagactgggttactccgtgttggtcaggctggtcttgaactcccgacctcaggtgatctgcccgccttggcctcccaaagtcctgggattacaggcatgagccactgctcccagccctgaatcttttaatcacaatacagcaccggatttaacaatggctcaaagacaacctgagctagagactggcagggcattatgaatggccccattaactgtgagaactaaaaccacaaatactggttttcccaactctttgtgaggtgcacagcgcttcttcacagacctcattgcgcttgagcctcacaccagccccacagggcagatggatagacagcattcgttttctggctttacagacatgcaggcctcaccctgctctccattctattgaggacaaaaccaagagcgagagaatgcacagctgacaggtgaccaggccagggctaaaagcaggttaccacgacttcacccaatcccagctttcagaagttacaggagaaagagatcacttcagacccagatgatcctaagatgtattttgagatagttgaaagtcatgccaggttgagataggaccgacaggggaaaataatggcatgggaataccaggcaggtggagctagctggacacagcagctgcaaagcagtgcttgctcagaagcaggggcctgccttgtttggggtcggccactcctattaactcacactccttgtgtgtccgcaggcattggcagtggcaggcctgagccccctcctccagagaagccattcccctgcctcattccctaggccttttgccaccccaccagccacacctggcagccgaggctggcccccacagcccgtccccaccctgcggcttgagggggtcgagtccagtgagaaactcaacagcagcttcccatccatccactgcggctcctgggctgagaccacccccggtggcgggggcagcagcgccgcccggagagtccggcccgtctccctcatggtgcccagccaggctggggccccagggaggcagttccacggcagtgccagcagcctggtggaagcggtaggtgactcgcagatgggcaggggggagaggccacgggcaacaaggggacttggcatgcggggctgagaagggagcacctggctcttgccaaattcattgcagtcaatatctgagcccgaaagaccctccctctcagggctgcaggagggctcgtgtgcggaaagccatgactgcacaagatgctatgggctctcttgaggctgggcccactgcagagggcggcagaaaccactgagcaacttatcccttatactgcagctgctcgacatgcaaatgtgagcctggctgcctttatacacagacaggcaagatccaaggtgctcaggcctgactgcccgtgagcatcacctggggagctttggaaacccgggacagattaactgatgattgttaaagctcttcgatgattttaacgtgtagcaaggttgagagccactagcctagaacaagcgagctttcagtcccactgtgctctgcctggtcagagcatctagtgcaatcccggcaccacattattagggacctttgacacactggaacaaacccaacagaggatgaccaggatggcaaggttcctagaaaccatttcctaggagaaccgtttcagggaattcgggaagaaaacctggagaggaggtgactttggagggtgcgatacacctctcacacctgcaacgggtgggatggggaaagggtggcaggctcagcccaccagcggacagatttcagctcacatggggaagaccttcccaaatgagctcttccaagatgagaggggcttgcctgaaaggtagtgagccccccatcatcagacatagccaagcagagactgtgctcatccgggcgtcaggctgtggtgcaggaggtggggcgttaaaccaggtggcttccaaggtttacctctcaaagtctggtattcctgtggcctcgatcatcctgcattcatttcacagaccttccctgagcgcctaccatgtgcaggccctgttctaggtacagggacacagctgagaaacagagcttctgctctcatgagctcacatcatggtgaggagagacagataataaacacatacatatataacacatcaggaaggtcaggagtgccaaagaaaaactaagcagggcaaggagagaatgagtggcgtgggcaaggagcaagacaaacagatgcctgaaaggagcgagtgccaggctgcactcagcttcccccgacccgctggctcaggagccgattttcccatagccaggcactaagcagccggtagggaggacagagaagcttaagggtcacctgctggcccttcccagcagaagcaaggcaggggcatgcgccgtgtttgcacagatacctcacccctggaaaggcagcagcaggcaatgggcagtgggcctgtctcagcagtttcaccagggagaatggtttctctgaaagaatagtataaaggttcagtgggtgtcagaaaggagagaggcaggctgggatctgctgatacagcatcagggcaaccccccggcccctctgagagccaaaccttctctggtttttgttttggttgttttttgagacagggtctcgctctgtcacccaggctggagtgtagtggtacaatcacagctcagtgcagcctggcgctgctggggtcaaatgatcctcccacctcagtctctggccttgctaagatcacaggtgtgcatcaccacacccagctaattattcttaaattttttgtagagacgaagtttccctgtgttgcctgggcctggtctcgaactcctgggctcaagcagtccttctgcctgggcttcccaaagtgctgggtgacaggtgtgagccaccgtgctgggccataagcaagtcttcatatatttgatgacagtgtttgaccaccccagccaaaacttctctggcctgcacatccctaattctggcagatgctccatctccacttgttccccatgggtgcccctcccaacacacacacgtacacgtgcacacacgcacacttccccaagtgacctaccagataccccctcgctctagccctcaagggaagagctgggctccaggagtaatgttcctttggttcttcatggctcccaccccgctccttcaggtcttgatttcagaaggactggggcagtttgctcaagatcccaagttcatcgaggtcaccacccaggagctggccgacgcctgcgacatgaccatagaggagatggagagcgcggccgacaacatcctcagcgggggcgccccacagagccccaatggcgccctcttaccctttgtgaactgcagggacgcggggcaggaccgagccgggggcgaagaggacgcgggctgtgtgcgcgcgcggggtcgaccgagtgaggaggagctccaggacagcagggtctacgtcagcagcctgtagtgggcgctgccagatgcgggcttttttttatttgtttcaatgttcctaatgggttcgtttcagaagtgcctcactgttctcgtgacctggagttaaccggaacagcgtcttcattcatttctgttgggaccagacgcggagcctgggtgcgcgagccgccctccgggaggaaggcgcccggctgcgtctgcagaggcggggagaggaggcggcgagggtcccggggcgcgaggaaggcgcctgccctctcccagctcgcaggccccgggcccggccgcgcctccgcggggagagcaccccggcttcccgcgcgccctcaccaaaaggaccctacagcaaacgggtgtctttcgactctgcttgtagaaaccatttgcacatattctgtacgagcctcgctgtctccctagagccagggccctgcggatttggagaagggagcggggcaggacttccaggaggaccccaacccggcccggagagggaggaggaggcctccaggggcgcggagctctggggatgggcgtcgggccggcagtggtgcggctcactccgtccctgcccacctgcgacgggatcccccgaccggcacgggccacgccgagctcccggccagccgccggcccgcaggcagcgcgagggaggagctgcgccgccggctccgcccaaccaggtggtgctgagcttccgctgagcgctcttttgttttgtggtttgacacttttcttgacagcatgttgcagtttcttttcggttttggttttttttaaatgttttattttgctttcccagcgggaggggaggaagaagagtgtttacaaagtcctgtagccccctcacctttctgttttcacttttgccaatgtacatcgggtttggttttcttgtattatttaaacggttgtggtttcctttttccacggaggttcaatagaagccgctgcaggagagttttaccaaccattgtgtatgcccaataatttgttatcatttccttaggtagtaacctatttttgttctggtttggttcggttatctaatggaaaggtaactggcaatgcacttgatgtggtcttgcacatgtgggtgatagagttgggttcctttttatgctgggtgtacaggtgggtttgggagagaggagcatgcgcgagagagtctccgagtgtgtgcgacgcgtgtgtgtgtggtgggttgtctgtgtgcatatgtcctgcccgtgtatatgcacccacaccatgtgcccgtgcacaccagtgactacgcagtcccccctttctggtttagctgtgggaagatctgaatctggggccgtttgaaagcaaaaacaaaccactgtctctgcttctgaaacgggaatcagtaactctttgcattttctgtcccacaagatatgcaaaaacaatgcaataatattcatttaaaaatacaattgtgagttgtgttggcattaaaactgtattttaaaaaaagacagaaatttaagggaaaaacacaagaaggcattttgcttcaatatattccgtgtaatgttttattgcattgataatgtttctgttgaagaaaccgttatacttgaattcaggtcagtttcagtatttttcaaatatttttttaaaactgaattgcaattgtgccaagcgaatataatgaattgaattaagttggttttcggattcacttcttgtatattttgctgcatgtaaagtaaatcattttgtatttggagtgtgacaagctttacctttgaactcaagtgcttttctatatgtggttgggggaaagggaacaagttttctttagtttgcacaatgagcaaaggtatcaccagtgtagtcattattctgctctccacaaacaggtttggacattactgttttgcatatcttgtgtttgcttacatttccctcaatttttccaaaatcgtttgctgggtatgtttgtaccgcctcttgctgtgagagaccaggacctattttattccagtcttcactctgtccactctgctctggtcatctgatttggtacttctccaagaacagcccttcactgtgaggtgcagggaggcgttctgatgagccctcagtcactgggccgtcatccgcatcccccatggaagaggtagctggctttcccttcccttccaccacacggaattttctctttggcttccttaggaaagtgtacactaaccgggaggataaaattaaagtcaggctgcttggagggaggggcatcctcacttccggattcttgttgctctacccaacaaggacagcaggggctcgagaaaggaactggtgaaaccctgatccatctgaaagtcaactctgcgtgctcctttctccatcccttcctcactctggagcagcctttccttcaggcttgccctaatgtttgggctgccggggagggggccaggacaagggaagaggcatccggagctcacagtgggggtgggaacagatttttgtgggggcatctctaatgctcacttatatctccctagaacatcactcttttggtgctgtgtccttcaaatgtatgtcaacagtggtggctgaaaagggactgctttggggaaaacaggacccaaccattcacccagaattgacccattaaatctcttccagtcctagtgttccctgagcccctcttggcacatatataagtaagctagaaattacaataagggacagtccattcctctatgacagcttgctggactgattcatgacaaagtggagaaatgtactcaatactccccggttaacacagtctagaaacagagtttctttatggatatccacacccaagtcatccaaactttcttgattccttttcactgccatcaaggtcctctagaaattgagtttaggtatcatcctttgaaaagttcccaagatttctaccaggaggtacacacaggcgttccctgtctagggcaggaggactatcctagcttgaccttctgatccactagaataagactggcgtatgatgcctgtcatcagaacagactggcacaagtagtgacatcaatgaaccacagcacaatcttccaagtgatgtctactctccacctaaaatggaattttccccatgaccttgtaaaacataattgtcacatcttccatacccctcctgacagcccccaagtgtcaggagaaaacagtcaggggctaagggcccaagggacttgaagaaacaacagtttaaggtctgcagtttggtcaacttaattcttgtcctccgaccagccctgcctctttcatttccagaccttggagaatttttcccagctttgattcagaaggtactagttataacccctttccttcttcttaatccaataggcctcactctcactgggaaatccactcaaaggaacaaggcaatgtctctcattctatttcccagttccaaattccaggtgcttgtctggagtgaagctacccgttactttctcccagcttttctccacccagcatgtctcctgcccatgcagctgaagacagtggggcaacctcaggagaagcagacctttccatgcccaagttcatctcctgagcaacagtgacacctagaaaatgaggactttggaagtcacccaaaagatggtggctactttatggagtcctgaagatacacagccaccactcctaaaggcaaagaaagaaaacacgaatgtaggtcagggatagagtggaaccctggtcatcggggtttttagcctcatcgtgggaaaggtggtaaaggaggatgatggcatctccatccctagaggccaagaattgaaatatcattgtcaaggattagaaacaattcagcaaagaggccacaaaaagggcctgctgactcccagaagacctctttaaaccccaggggaggcaaatacttgctgatggagtctgggccgtttccatattttaaagaagacctgcctctggggcaaatgtcagcacagagaggactgggaggagaatggaggcaagaaaagggcatattttgactccctctgtgcctcttcccagttcatggaaggatgtgttcagcttacccacccacagtgaccagtgtggtggagccgctgacatctcaaggatctatttgggaaggtgagaagagtactcattccatctgggggtgttgttccagccacatcagcctacctggtgggatgtgggggtgtctgccaccctgtcccccctctgctgatgtccctcccctcaggctgtccaggtgccacctgacacaggctgctgtgcaaagacaggcggggaagcccaaacctcactcccagggaggccctcagccgccagagtccaggttctccagaggctacgatttgaggaggttgagggggaagacaggagggaaagaaaagtcctacaactgtcaggaatggggcacctttccctgtccctaagcaaagctccctcttcccactgccctccccagccccagctccctgtcctccccaacacctagtgagaaagacggtgcgtggaagggagtcccatgggcagatgcttacacgacctctttgtgaagcctcttctgggtttaacttcattcatcaatttattcttatgtcaaagcaatgaaacttttctttctggagccagataccaatacaacaggtgaacgggtttctgccacatctctacattgacgggggatgcttgaacaacccccctcactacacagacacacaccgttaaggcacaagggctggggttgagctctagatgagggactttcctgctcctgcaagggtgagcactgtatacacagacaaggagggtgcagtagagtgactcccttggatggaagtagtaccatcagaacctactattattatgacataaattctatttacatacattgagagaatactacaatcaacactttttcctgggatgactttaagaggtttgagccacagcacctgaagtggcaaagatccatggtctttgtagggtattagagaactcttccagtcacctctgaaagcactctagatcttgcagctgagtggatgaagtgtaacaaatctgttgcacgctgagaggagtcagaattagcatttttcatgaaagttccccacgtctctactaagaatgaggaagaaaagactaagactaggtaattacacagaggcttgaaatgttacatcaccagagccaagtcctctcccttcagatcagttactggctgctacacagggacacccccaccttttcagggcatcccatgcactccacttctcaggatctaaggaatttgactttgtagggatcccagaaagggcactgtgccacttcccctggtgtgaatcagacatacattgtacattcatttctaaaattcactcatgcacctcaaaccaaggtcattatccaaaaaaaaaaaaaaaaagctctgggtggaagagtttgtaagttttaagagagggtcatttctatgtgaggaaatgcagaaatggacagaatgattcttattcactgtttgggtctggagaattcccattgtggaaatcttagagatctcaagtttattaccaagggaataaggaaaaaaaggtgagcaggcaccaggccaagcagtggctcccttgccaaggaacctgaggctgcaggtttcagggacccccttgaagaaacctctcctggccattggccaggagaaaagagaagtctctcctgtagagtcacaagagaagcaaaagagggtgggtcactgggtcctggacatagcccccaaccccaagacttcccaatatggagaaactacaccaatgtttaaaaggggaaaaggaaagaacttgtacatcaagggaagatgatttgtaaacacacagtcctgtgcagaaagatccccttcaggaggtgtctccagcatcccaaagctgtgcgcaccttctcttttcctgcctcaggccacctatgcatccagctgcagcccatacccacacctgaaatccatctcttgaatcccagccaggttatataccaccccattgccatgtcctgtcctggccagaatgcatgctgttcccccaagcctcgtgggagtgaggccatgggaaacagagatgagcatgtctggacaagtctgtgatggtagtggatgagaataacccatggcaaaacacgcacattcattaagaaatagggcgacagattccccgttggtgaagcactgaaaggtctattactctcataatattgctgttttattttaatccaccagagctaccatgcaaaactttcctcctgtgaaacgctccagataaagctcctctaatctccccttccctcatgtcctccagctcaaacccaccttcatcccccaaaccaatctgtatcatgcctgttatcagagaggcacagaaagatgggcagtgcctccgttgtcaccattccccacacccctacacacccccacaccctcccctccaggctccacgacttcacagtcttactgttgtaaatatcattgtacagtttgtaatcctcaaataatcccattgtcagaggcctcgcctgatgggccttctcaccctcgagaaaggccagggaatctagaaggggcaacccttcaaggagagcttcagggtcatctctgtgtgagacactattgtatattcctgtaagattgcatttttatctaaggaatgatgttatttaaaaaacaaacaaaaaacacaaaaaataagaattgcaaataaatttcttaacaatgtcta
